United States Patent Application Publication US 2026/0243771 A1, published August 20, 2026 (application 18/880,897).

The application's sequence listing, which the Patent Office published only in electronic form, follows.

SEQUENCE LISTING (39 sequences)

SEQ ID NO: 1 - protein, 252 aa, Homo sapiens
  source 1..252: note = C4BPB, UNITPROT ID: P20851
MFFWCACCLMVAWRVSASDAEHCPELPPVDNSIFVAKEVEGQILGTYVCIKGYHLVGKKTLFCNASKEWDNTTTECRLGHCPDPVLVNGEFSSSGPVNVSDKITFMCNDHYILKGSNRSQCLEDHTWAPPFPICKSRDCDPPGNPVHGYFEGNNFTLGSTISYYCEDRYYLVGVQEQQCVDGEWSSALPVCKLIQEAPKPECEKALLAFQESKNLCEAMENFMQQLKESGMTMEELKYSLELKKAELKAKLL

SEQ ID NO: 2 - DNA, 1131 bp, Homo sapiens
  source 1..1131: mol_type = genomic DNA; note = C4BPB Accession number: NM_000716
attcccagaaaccaggaaatttctgaaactgagttttaaacctggcaactcttttaccatccctttgtatttttgcagttcctccctataccagcttccttacagctgttctgatttcctgtcgtaagattttttcttttcattttctccagggagggtaaatcaatataacctcttctctagagaggaggtggttaggttggtcttaagcagtgttagaagatctattttttttcaaaccaggtgtctgagctgggtgaattccagcctggggagaggactttgatcaccagatgtttttttggtgtgcgtgctgtcttatggttgcgtggcgagtttctgcttcagatgcagagcactgtccagagcttcctccagtggacaatagcatatttgtcgcaaaggaggtggaaggacagattctggggacttacgtttgtatcaagggctaccacctggtaggaaagaagacccttttttgcaatgcctctaaggagtgggataacaccactactgagtgccgcttgggccactgtcctgatcctgtgctggtgaatggagagttcagttcttcagggcctgtgaatgtaagtgacaaaatcacgtttatgtgcaatgaccactacatcctcaagggcagcaatcggagccagtgtctagaggaccacacctgggcacctccctttcccatctgcaaaagtagggactgtgaccctcctgggaatccagttcatggctattttgaaggaaataacttcaccttaggatccaccattagttattactgtgaagacaggtactacttagtgggcgtgcaggagcagcaatgcgttgatggggagtggagcagtgcacttccagtctgcaagttgatccaggaagctcccaaaccagagtgtgagaaggcacttcttgcctttcaggagagtaagaacctctgcgaagccatggagaactttatgcaacaattaaaggaaagtggcatgacaatggaggagctaaaatattctctggagctgaagaaagctgagttgaaggcaaaattgttgtaacactacagctgagcagatgtaatagaaataaacctatgaataaattttcttcttggttctgaaaaaaaaaaaaaaaaaa

SEQ ID NO: 3 - protein, 1820 aa, Homo sapiens
  source 1..1820: note = KIF20B UNITPROT ID: Q96Q89
MESNFNQEGVPRPSYVFSADPIARPSEINFDGIKLDLSHEFSLVAPNTEANSFESKDYLQVCLRIRPFTQSEKELESEGCVHILDSQTVVLKEPQCILGRLSEKSSGQMAQKFSFSKVFGPATTQKEFFQGCIMQPVKDLLKGQSRLIFTYGLTNSGKTYTFQGTEENIGILPRTLNVLFDSLQERLYTKMNLKPHRSREYLRLSSEQEKEEIASKSALLRQIKEVTVHNDSDDTLYGSLTNSLNISEFEESIKDYEQANLNMANSIKFSVWVSFFEIYNEYIYDLFVPVSSKFQKRKMLRLSQDVKGYSFIKDLQWIQVSDSKEAYRLLKLGIKHQSVAFTKLNNASSRSHSIFTVKILQIEDSEMSRVIRVSELSLCDLAGSERTMKTQNEGERLRETGNINTSLLTLGKCINVLKNSEKSKFQQHVPFRESKLTHYFQSFFNGKGKICMIVNISQCYLAYDETLNVLKFSAIAQKVCVPDTLNSSQEKLFGPVKSSQDVSLDSNSNSKILNVKRATISWENSLEDLMEDEDLVEELENAEETQNVETKLLDEDLDKTLEENKAFISHEEKRKLLDLIEDLKKKLINEKKEKLTLEFKIREEVTQEFTQYWAQREADFKETLLQEREILEENAERRLAIFKDLVGKCDTREEAAKDICATKVETEETHNYVGFEDIIDSLQDNVADIKKQAEIAHLYIASLPDPQEATACLELKFNQIKAELAKTKGELIKTKEELKKRENESDSLIQELETSNKKIITQNQRIKELINIIDQKEDTINEFQNLKSHMENTFKCNDKADTSSLIINNKLICNETVEVPKDSKSKICSERKRVNENELQQDEPPAKKGSIHVSSAITEDQKKSEEVRPNIAEIEDIRVLQENNEGLRAFLLTIENELKNEKEEKAELNKQIVHFQQELSLSEKKNLTLSKEVQQIQSNYDIAIAELHVQKSKNQEQEEKIMKLSNEIETATRSITNNVSQIKLMHTKIDELRTLDSVSQISNIDLLNLRDLSNGSEEDNLPNTQLDLLGNDYLVSKQVKEYRIQEPNRENSFHSSIEAIWEECKEIVKASSKKSHQIEELEQQIEKLQAEVKGYKDENNRLKEKEHKNQDDLLKEKETLIQQLKEELQEKNVTLDVQIQHVVEGKRALSELTQGVTCYKAKIKELETILETQKVECSHSAKLEQDILEKESIILKLERNLKEFQEHLQDSVKNTKDLNVKELKLKEEITQLTNNLQDMKHLLQLKEEEEETNRQETEKLKEELSASSARTQNLKADLQRKEEDYADLKEKLTDAKKQIKQVQKEVSVMRDEDKLLRIKINELEKKKNQCSQELDMKQRTIQQLKEQLNNQKVEEAIQQYERACKDLNVKEKIIEDMRMTLEEQEQTQVEQDQVLEAKLEEVERLATELEKWKEKCNDLETKNNQRSNKEHENNTDVLGKLTNLQDELQESEQKYNADRKKWLEEKMMLITQAKEAENIRNKEMKKYAEDRERFFKQQNEMEILTAQLTEKDSDLQKWREERDQLVAALEIQLKALISSNVQKDNEIEQLKRIISETSKIETQIMDIKPKRISSADPDKLQTEPLSTSFEISRNKIEDGSVVLDSCEVSTENDQSTRFPKPELEIQFTPLQPNKMAVKHPGCTTPVTVKIPKARKRKSNEMEEDLVKCENKKNATPRTNLKFPISDDRNSSVKKEQKVAIRPSSKKTYSLRSQASIIGVNLATKKKEGTLQKFGDFLQHSPSILQSKAKKIIETMSSSKLSNVEASKENVSQPKRAKRKLYTSEISSPIDISGQVILMDQKMKESDHQIIKRRLRTKTAK

SEQ ID NO: 4 - DNA, 6321 bp, Homo sapiens
  source 1..6321: mol_type = genomic DNA; note = KIF20B Accession number: NM_016195
agtgcggtgccctggccgccattgtttgaatttgaaaacggtaacatcgcagtgctgctcgcgggtctggctagtcaggcgaagtttgcagaatggaatctaattttaatcaagagggagtacctcgaccatcttatgtttttagtgctgacccaattgcaaggccttcagaaataaatttcgatggcattaagcttgatctgtctcatgaattttccttagttgctccaaatactgaggcaaacagtttcgaatctaaagattatctccaggtttgtcttcgaataagaccatttacacagtcagaaaaagaacttgagtctgagggctgtgtgcatattctggattcacagactgttgtgctgaaagagcctcaatgcatccttggtcggttaagtgaaaaaagctcagggcagatggcacagaaattcagtttttccaaggtttttggcccagcaactacacagaaggaattctttcagggttgcattatgcaaccagtaaaagacctcttgaaaggacagagtcgtctgatttttacttacgggctaaccaattcaggaaaaacatatacatttcaagggacagaagaaaatattggcattctgcctcgaactttgaatgtattatttgatagtcttcaagaaagactgtatacaaagatgaaccttaaaccacatagatccagagaatacttaaggttatcatcagaacaagagaaagaagaaattgctagcaaaagtgcattgcttcggcaaattaaagaggttactgtgcataatgatagtgatgatactctttatggaagtttaactaactctttgaatatctcagagtttgaagaatccataaaagattatgaacaagccaacttgaatatggctaatagtataaaattttctgtgtgggtttctttctttgaaatttacaatgaatatatttatgacttatttgttcctgtatcatctaaattccaaaagagaaagatgctgcgcctttcccaagacgtaaagggctattcttttataaaagatctacaatggattcaagtatctgattccaaagaagcctatagacttttaaaactaggaataaagcaccagagtgttgccttcacaaaattgaataatgcttccagtagaagtcacagcatattcactgttaaaatattacagattgaagattctgaaatgtctcgtgtaattcgagtcagtgaattatctttatgtgatcttgctggttcagaacgaactatgaagacacagaatgaaggtgaaaggttaagagagactgggaatatcaacacttctttattgactctgggaaagtgtattaacgtcttgaagaatagtgaaaagtcaaagtttcaacagcatgtgcctttccgggaaagtaaactgactcactattttcaaagtttttttaatggtaaagggaaaatttgtatgattgtcaatatcagccaatgttatttagcctatgatgaaacactcaatgtattgaagttctccgccattgcacaaaaagtttgtgtcccagacactttaaattcctctcaagagaaattatttggacctgtcaaatcttctcaagatgtatcactagacagtaattcaaacagtaaaatattaaatgtaaaaagagccaccatttcatgggaaaatagtctagaagatttgatggaagacgaggatttggttgaggagctagaaaacgctgaagaaactcaaaatgtggaaactaaacttcttgatgaagatctagataaaacattagaggaaaataaggctttcattagccacgaggagaaaagaaaactgttggacttaatagaagacttgaaaaaaaaactgataaatgaaaaaaaggaaaaattaaccttggaatttaaaattcgagaagaagttacacaggagtttactcagtattgggctcaacgggaagctgactttaaggagactctgcttcaagaacgagagatattagaagaaaatgctgaacgtcgtttggctatcttcaaggatttggttggtaaatgtgacactcgagaagaagcagcgaaagacatttgtgccacaaaagttgaaactgaagaagctactgcttgtttagaactaaagtttaatcaaattaaagctgaattagctaaaaccaaaggagaattaatcaaaaccaaagaagagttaaaaaagagagaaaatgaatcagattcattgattcaagagcttgagacatctaataagaaaataattacacagaatcaaagaattaaagaattgataaatataattgatcaaaaagaagatactatcaacgaatttcagaacctaaagtctcatatggaaaacacatttaaatgcaatgacaaggctgatacatcttctttaataataaacaataaattgatttgtaatgaaacagttgaagtacctaaggacagcaaatctaaaatctgttcagaaagaaaaagagtaaatgaaaatgaacttcagcaagatgaaccaccagcaaagaaagggtctatccatgttagttcagctatcactgaagaccaaaagaaaagtgaagaagtgcgaccgaacattgcagaaattgaagacatcagagttttacaagaaaataatgaaggactgagagcatttttactcactattgagaatgaacttaaaaatgaaaaggaagaaaaagcagaattaaataaacagattgttcattttcagcaggaactttctctttctgaaaaaaagaatttaactttaagtaaagaggtccaacaaattcagtcaaattatgatattgcaattgctgaattacatgtgcagaaaagtaaaaatcaagaacaggaggaaaagatcatgaaattgtcaaatgagatagaaactgctacaagaagcattacaaataatgtttcacaaataaaattaatgcacacgaaaatagacgaactacgtactcttgattcagtttctcagatttcaaacatagatttgctcaatctcagggatctgtcaaatggttctgaggaggataatttgccaaatacacagttagaccttttaggtaatgattatttggtaagtaagcaagttaaagaatatcgaattcaagaacccaatagggaaaattctttccactctagtattgaagctatttgggaagaatgtaaagagattgtgaaggcctcttccaaaaaaagtcatcagattgaggaactggaacaacaaattgaaaaattgcaggcagaagtaaaaggctataaggatgaaaacaatagactaaaggagaaggagcataaaaaccaagatgacctactaaaagaaaaagaaactcttatacagcagctgaaagaagaattgcaagaaaaaaatgttactcttgatgttcaaatacagcatgtagttgaaggaaagagagcgctttcagaacttacacaaggtgttacttgctataaggcaaaaataaaggaacttgaaacaattttagagactcagaaagttgaatgtagtcattcagccaagttagaacaagacattttggaaaaggaatctatcatcttaaagctagaaagaaatttgaaggaatttcaagaacatcttcaggattctgtcaaaaacaccaaagatttaaatgtaaaggaactcaagctgaaagaagaaatcacacagttaacaaataatttgcaagatatgaaacatttacttcaattaaaagaagaagaagaagaaaccaacaggcaagaaacagaaaaattgaaagaggaactctctgcaagctctgctcgtacccagaatctgaaagcagatcttcagaggaaggaagaagattatgctgacctgaaagagaaactgactgatgccaaaaagcagattaagcaagtacagaaagaggtatctgtaatgcgtgatgaggataaattactgaggattaaaattaatgaactggagaaaaagaaaaaccagtgttctcaggaattagatatgaaacagcgaaccattcagcaactcaaggagcagttaaataatcagaaagtggaagaagctatacaacagtatgagagagcatgcaaagatctaaatgttaaagagaaaataattgaagacatgcgaatgacactagaagaacaggaacaaactcaggtagaacaggatcaagtgcttgaggctaaattagaggaagttgaaaggctggccacagaattggaaaaatggaaggaaaaatgcaatgatttggaaaccaaaaacaatcaaaggtcaaataaagaacatgagaacaacacagatgtgcttggaaagctcactaatcttcaagatgagttacaggagtctgaacagaaatataatgctgatagaaagaaatggttagaagaaaaaatgatgcttatcactcaagcgaaagaagcagagaatatacgaaataaagagatgaaaaaatatgctgaggacagggagcgtttttttaagcaacagaatgaaatggaaatactgacagcccagctgacagagaaagatagtgaccttcaaaagtggcgagaagaacgagatcaactggttgcagctttagaaatacagctaaaagcactgatatccagtaatgtacagaaagataatgaaattgaacaactaaaaaggatcatatcagagacttctaaaatagaaacacaaatcatggatatcaagcccaaacgtattagttcagcagatcctgacaaacttcaaactgaacctctatcgacaagttttgaaatttccagaaataaaatagaggatggatctgtagtccttgactcttgtgaagtgtcaacagaaaatgatcaaagcactcgatttccaaaacctgagttagagattcaatttacacctttacagccaaacaaaatggcagtgaaacaccctggttgtaccacaccagtgacagttaagattcccaaggctcggaagaggaagagtaatgaaatggaggaggacttggtgaaatgtgaaaataagaagaatgctacacccagaactaatttgaaatttcctatttcagatgatagaaattcttctgtcaaaaaggaacaaaaggttgccatacgtccatcatctaagaaaacatattctttacggagtcaggcatccataattggtgtaaacctggccactaagaaaaaagaaggaacactacagaaatttggagacttcttacaacattctccctcaattcttcaatcaaaagcaaagaagataattgaaacaatgagctcttcaaagctctcaaatgtagaagcaagtaaagaaaatgtgtctcaaccaaaacgagccaaacggaaattatacacaagtgaaatttcatctcctattgatatatcaggccaagtgattttaatggaccagaaaatgaaggagagtgatcaccagattatcaaacgacgacttcgaacaaaaacagccaaataaatcacttatggaaatgtttaatataaattttatagtcatagtcattggaacttgcatcctgtattgtaaatataaatgtatatattatgcattaaatcactctgcatatagattgctgttttatacatagtataattttaattcaataaatgagtcaaaatttgtatatttttataaggcttttttataatagcttctttcaaactgtatttccctattatctcagacattggatcagtgaagatcctaggaaagaggctgttattctcatttattttgctatacaggatgtaataggtcaggtatttggtttacttatatttaacaatgtcttatgaattttttttactttatctgttatacaactgattttacatatctgtttggattatagctaggatttggagaataagtgtgtacagatcacaaaacatgtatatacattatttagaaaagatctcaagtctttaattagaatgtctcacttattttgtaaacattttgtgggtacatagtacatgtatatatttacggggtatgtgagatgttttgacacaggcatgcaatgtgaaatacgtgtatcatggagaatgaggtatccatcccctcaagcatttttcctttgaattacagataatccaattacattctttagatcatttaaaaatatacaagtaagttattattgattatagtcactctattgtgctatcagatagtagatcattctttttatcttatttgtttttgtacccattaaccatccccacctccccctgcaaccgtcagtacccttaccagccactggtaaccattcttctactctgtatgcccatgaggtcaattgattttatttttagatcccataaataaatgagaacatgca

SEQ ID NO: 5 - protein, 941 aa, Homo sapiens [sequence omitted]

SEQ ID NO: 6 - DNA, 3181 bp, Homo sapiens
  source 1..3181: mol_type = genomic DNA; note = VPS11 Accession number: NM_021729
gccaaaatggcggcctacctgcagtggcggcgcttcgttttcttcgacaaggagctggtgaaggagccgctgagcaatgatggggccgctcccggggccacacctgcttctggatccgctgcttccaagttcctttgcctccctcctggcatcactgtctgcgactcaggccgagggagcctggtctttggagatatggaaggccagatctggttcttgccacgttccctacagcttacaggcttccaagcctacaaactacgggtgacacacctgtaccaactgaagcagcacaatattctggcatctgttggagaagatgaagagggcatcaaccccttggttaagatctggaacctggagaagagagatggtggcaatccactctgcactcgaatcttccctgctattccaggaacagagccaactgttgtatcttgtttgactgtccatgaaaatctcaactttatggccattggtttcacagatggcagtgttacattgaacaaaggagacatcacccgggaccggcatagcaagacccagattttgcacaagggcaactatcctgtaactggattggcctttcgccaagcaggaaagaccactcacttgtttgttgtgacaacagagaacgtccagtcctatatagtttctggaaaagactaccctcgcgtggagttggacacccatggttgtggcctgcgctgctcagccctaagtgacccttctcaggacctgcagttcattgtggccggggatgagtgtgtctacttgtaccagcctgatgaacgtgggccctgcttcgcctttgagggccataagctcattgcccactggtttagaggctaccttatcattgtctcccgtgaccggaaggtttctcccaagtcagagtttaccagcagggattcacagagctccgacaagcagattctaaacatctatgacctgtgcaacaagttcatagcctatagcaccgtctttgaggatgtagtggatgtgcttgctgagtggggctccctgtacgtgctgacgcgggatgggcgggtccacgcactgcaggagaaggacacacagaccaaactggagatgctgtttaagaagaacctatttgagatggcgattaaccttgccaagagccagcatctggacagtgatgggctggcccagattttcatgcagtatggagaccatctctacagcaagggcaaccacgatggggctgtccagcaatatatccgaaccattggaaagttggagccatcctacgtgatccgcaagtttctggatgcccagcgcattcacaacctgactgcctacctgcagaccctgcaccgacaatccctggccaatgccgaccataccaccctgctcctcaactgctataccaagctcaaggacagctcgaagctggaggagttcatcaagaaaaagagtgagagtgaagtccactttgatgtggagacagccatcaaggtcctccggcaggctggctactactcccatgccctgtatctggcggagaaccatgcacatcatgagtggtacctgaagatccagctagaagacattaagaattatcaggaagcccttcgatacatcggcaagctgccttttgagcaggcagagagcaacatgaagcgctacggcaagatcctcatgcaccacataccagagcagacaactcagttgctgaagggactttgtactgattatcggcccagcctcgaaggccgcagcgatagggaggccccaggctgcagggccaactctgaggagttcatccccatctttgccaataacccgcgagagctgaaagccttcctagagcacatgagtgaagtgcagccagactcaccccaggggatctacgacacactccttgagctgcgactgcagaactgggcccacgagaaggatccacaggtcaaagagaagcttcacgcagaggccatttccctgctgaagagtggtcgcttctgcgacgtctttgacaaggccctggtcctgtgccagatgcacgacttccaggatggtgtcctttacctttatgagcaggggaagctgttccagcagatcatgcactaccacatgcagcacgagcagtaccggcaggtcatcagcgtgtgtgagcgccatggggagcaggacccctccttgtgggagcaggccctcagctacttcgctcgcaaggaggaggactgcaaggagtatgtggcagctgtcctcaagcatatcgagaacaagaacctcatgccacctcttctagtggtgcagaccctggcccacaactccacagccacactctccgtcatcagggactacctggtccaaaaactacagaaacagagccagcagattgcacaggatgagctgcgggtgcggcggtaccgagaggagaccacccgtatccgccaggagatccaagagctcaaggccagtcctaagattttccaaaagaccaagtgcagcatctgtaacagtgccttggagttgccctcagtccacttcctgtgtggccactccttccaccaacactgctttgagagttactcggaaagtgatgctgactgccccacctgcctccctgaaaaccggaaggtcatggatatgatccgggcccaggaacagaaacgagatctccatgatcaattccagcatcagctcaagtgctccaatgacagcttttctgtgattgctgactactttggcagaggtgttttcaacaaattgactctgctgaccgaccctcccacagccagactgacctccagcctggaggctgggctgcaacgcgacctactcatgcactccaggaggggcacttaagcagcctggaggaagatgtgggcaacagtggaggaccaagagaacagacacaatgggacctgggcgggcgttacacagaaggctggctgacatgcccagggctccactctcatctaatgtcacagccctcagaactaaagcggactttctttccctgccttcttatttagtcagcttgccatccctcctcttcactagcagtgtagatcattccagatcagtgggggagggcacctcagcaacctctgagtgtggacaatagctgctttcttctctatccaagagcaccaggctgtgcttgggtccttgctctcagagtctataaataaaagaatataatgatttggga

SEQ ID NO: 7 - protein, 661 aa, Homo sapiens
  source 1..661: note = CRTAC1 UNITPROT ID: Q9NQ79
MAPSADPGMSRMLPFLLLLWFLPITEGSQRAEPMFTAVTNSVLPPDYDSNPTQLNYGVAVTDVDHDGDFEIVVAGYNGPNLVLKYDRAQKRLVNIAVDERSSPYYALRDRQGNAIGVTACDIDGDGREEIYFLNTNNAFSGVATYTDKLFKFRNNRWEDILSDEVNVARGVASLFAGRSVACVDRKGSGRYSIYIANYAYGNVGPDALIEMDPEASDLSRGILALRDVAAEAGVSKYTGGRGVSVGPILSSSASDIFCDNENGPNFLFHNRGDGTFVDAAASAGVDDPHQHGRGVALADFNRDGKVDIVYGNWNGPHRLYLQMSTHGKVRFRDIASPKFSMPSPVRTVITADFDNDQELEIFFNNIAYRSSSANRLFRVIRREHGDPLIEELNPGDALEPEGRGTGGVVTDFDGDGMLDLILSHGESMAQPLSVFRGNQGFNNNWLRVVPRTRFGAFARGAKVVLYTKKSGAHLRIIDGGSGYLCEMEPVAHFGLGKDEASSVEVTWPDGKMVSRNVASGEMNSVLEILYPRDEDTLQDPAPLECGQGFSQQENGHCMDTNECIQFPFVCPRDKPVCVNTYGSYRCRTNKKCSRGYEPNEDGTACVGTLGQSPGPRPTTPTAAAATAAAAAAAGAATAAPVLVDGDLNLGSVVKESCEPSC

SEQ ID NO: 8 - DNA, 2683 bp, Homo sapiens
  source 1..2683: mol_type = genomic DNA; note = CRTAC1 Accession number: NM_018058
gtataaagcgagcgcgcggcgtcggggcgggaggctcgaggccagcccgggaccggggctgggagcaagcaggcggcggcgccggcggcagaggcggcagcgagcgcccgcttcccacgcccctaggcggcggggccgagagcgggaggatggctccgagcgctgaccccggcatgtccaggatgttaccgttcctgctgctgctctggtttctgcccatcactgaggggtcccagcgggctgaacccatgttcactgcagtcaccaactcagttctgcctcctgactatgacagtaatcccacccagctcaactatggtgtggcagttactgatgtggaccatgatggggactttgagatcgtcgtggcggggtacaatggacccaacctggttctgaagtatgaccgggcccagaagcggctggtgaacatcgcggtcgatgagcgcagctcaccctactacgcgctgcgggaccggcaggggaacgccatcggggtcacagcctgcgacatcgacggggacggccgggaggagatctacttcctcaacaccaataatgccttctcgggggtggccacgtacaccgacaagttgttcaagttccgcaataaccggtgggaagacatcctgagcgatgaggtcaacgtggcccgtggtgtggccagcctctttgccggacgctctgtggcctgtgtggacagaaagggctctggacgctactctatctacattgccaattacgcctacggtaatgtgggccctgatgccctcattgaaatggaccctgaggccagtgacctctcccggggcattctggcgctcagagatgtggctgctgaggctggggtcagcaaatatacagggggccgaggcgtcagcgtgggccccatcctcagcagcagtgcctcggatatcttctgcgacaatgagaatgggcctaacttccttttccacaaccggggcgatggcacctttgtggacgctgcggccagtgctggtgtggacgacccccaccagcatgggcgaggtgtcgccctggctgacttcaaccgtgatggcaaagtggacatcgtctatggcaactggaatggcccccaccgcctctatctgcaaatgagcacccatgggaaggtccgcttccgggacatcgcctcacccaagttctccatgccctcccctgtccgcacggtcatcaccgccgactttgacaatgaccaggagctggagatcttcttcaacaacattgcctaccgcagctcctcagccaaccgcctcttccgcgtcatccgtagagagcacggagaccccctcatcgaggagctcaatcccggcgacgccttggagcctgagggccggggcacagggggtgtggtgaccgacttcgacggagacgggatgctggacctcatcttgtcccatggagagtccatggctcagccgctgtccgtcttccggggcaatcagggcttcaacaacaactggctgcgagtggtgccacgcacccggtttggggcctttgccaggggagctaaggtcgtgctctacaccaagaagagtggggcccacctgaggatcatcgacgggggctcaggctacctgtgtgagatggagcccgtggcacactttggcctggggaaggatgaagccagcagtgtggaggtgacgtggccagatggcaagatggtgagccggaacgtggccagcggggagatgaactcagtgctggagatcctctacccccgggatgaggacacacttcaggacccagccccactggagtgtggccaaggattctcccagcaggaaaatggccattgcatggacaccaatgaatgcatccagttcccattcgtgtgccctcgagacaagcccgtatgtgtcaacacctatggaagctacaggtgccggaccaacaagaagtgcagtcggggctacgagcccaacgaggatggcacagcctgcgtggggactctcggccagtcaccgggcccccgccccaccacccccaccgctgctgctgccactgccgctgctgctgccgctgctggagctgccactgctgcaccggtcctcgtagatggagatctcaatctggggtcggtggttaaggagagctgcgagcccagctgctgagcaggggtgggacatgaaccagcggatggagtccagcaggggagtgggaaagtgggcttgtgctgctgcctagacagtagggatgtaaaggcctgggagctagaccctccccaagcccatccatgcacattacttagctaacaattagggagactcgtaaggccaggccctgtgctgggcacatagctgtgatcacagcagacagggtcgctgccctgatggcgcttacattccagtgggtctaatgaccatatcttaggacacagatgtgcccagggaggtggtgtcactgcacaggaagtatgaggactttagtgtcctgagttcaaatcctgattcaggaactcacaaagctatgtgaccttacaccagtcacttaacttgttagccatccattatcgcatctgcaaaatggggattaagaatagaatcttggggttagtgtggagattagattaaatgtatgtaagacacttggcacaaaacctggcacatagtaaaggctcaataaaaacaagtgcctctcactgggctttgtcaacacgtga

SEQ ID NO: 9 - protein, 995 aa, Homo sapiens
  source 1..995: note = TMEM67 UNITPROT ID: Q5HYA8
MATRGGAGVAMAVWSLLSARAVTAFLLLFLPRFLQAQTFSFPFQQPEKCDNNQYFDISALSCVPCGANQRQDARGTSCVCLPGFQMISNNGGPAIICKKCPENMKGVTEDGWNCISCPSDLTAEGKCHCPIGHILVERDINGTLLSQATCELCDGNENSFMVVNALGDRCVRCEPTFVNTSRSCACSEPNILTGGLCFSSTGNFPLRRISAARYGEVGMSLTSEWFAKYLQSSAAACWVYANLTSCQALGNMCVMNMNSYDFATFDACGLFQFIFENTAGLSTVHSISFWRQNLPWLFYGDQLGLAPQVLSSTSLPTNFSFKGENQNTKLKFVAASYDIRGNFLKWQTLEGGVLQLCPDTETRLNAAYSFGTTYQQNCEIPISKILIDFPTPIFYDVYLEYTDENQHQYILAVPVLNLNLQHNKIFVNQDSNSGKWLLTRRIFLVDAVSGRENDLGTQPRVIRVATQISLSVHLVPNTINGNIYPPLITIAYSDIDIKDANSQSVKVSFSVTYEMDHGEAHVQTDIALGVLGGLAVLASLLKTAGWKRRIGSPMIDLQTVVKFLVYYAGDLANVFFIITVGTGLYWLIFFKAQKSVSVLLPMPIQEERFVTYVGCAFALKALQFLHKLISQITIDVFFIDWERPKGKVLKAVEGEGGVRSATVPVSIWRTYFVANEWNEIQTVRKINSLFQVLTVLFFLEVVGFKNLALMDSSSSLSRNPPSYIAPYSCILRYAVSAALWLAIGIIQVVFFAVFYERFIEDKIRQFVDLCSMSNISVFLLSHKCFGYYIHGRSVHGHADTNMEEMNMNLKREAENLCSQRGLVPNTDGQTFEIAISNQMRQHYDRIHETLIRKNGPARLLSSSASTFEQSIKAYHMMNKFLGSFIDHVHKEMDYFIKDKLLLERILGMEFMEPMEKSIFYNDEGYSFSSVLYYGNEATLLIFDLLFFCVVDLACQNFILASFLTYLQQEIFRYIRNTVGQKNLASKTLVDQRFLI

SEQ ID NO: 10 - DNA, 4678 bp, Homo sapiens
  source 1..4678: mol_type = genomic DNA; note = TMEM67 Accession number: NM_153704
gaggcttccagcgtcggtaccatggcgacgcgcggtggggctggggtggcaatggcggtttggtccctcttatccgcccgggccgtgaccgcgttccttctgttgttcctccctcgcttcttacaggcccagaccttctctttccctttccagcagccggagaagtgcgacaacaaccagtactttgatatctccgccctctcgtgtgttccttgtggagctaaccagaggcaagatgcccgaggaacttcatgtgtatgtctaccaggatttcagatgatctctaataatggaggacctgctattatttgtaaaaagtgcccagaaaacatgaaaggtgttacagaagatggctggaactgcatttcttgccctagtgacttaactgccgaaggaaaatgtcactgtcccattggccatattttagtggaaagagacattaatggaacattgttgtctcaagcaacttgtgagctctgtgatggaaatgaaaactcttttatggtagtaaatgctttaggagacaggtgcgtccgatgtgagccaacatttgttaataccagcaggtcctgtgcatgttcagaacctaacattttaacagggggattatgtttcagcagcacagggaattttcctctacgtagaatttcagctgcacgttatggagaagttggcatgtctttaacttcagaatggtttgcaaagtatttgcaatcatcagcagctgcatgttgggtatatgccaatctaacatcttgtcaagctcttggaaatatgtgtgtgatgaacatgaattcttacgactttgccacatttgatgcatgtggactatttcagtttatctttgaaaatactgctggactgagcactgttcattctatttcattttggagacagaatcttccttggctgttttatggagaccagttaggattagcacctcaagtgctcagttctacctctcttcctacaaatttcagttttaaaggagaaaaccagaatacaaaactgaagtttgttgctgcttcctatgatataagaggaaattttctcaagtggcaaactttagaaggaggtgttttacagctttgtccagacacagagacaaggctaaatgctgcttattcatttggaacaacctaccaacaaaattgtgagattcctatctctaagatcttaattgactttcccactcctatattttatgatgtgtaccttgaatatactgatgaaaatcaacatcaatatattttggctgtgcctgtgttaaacctaaatcttcaacataataagatatttgtgaaccaagacagcaactctggaaagtggcttctaactcggcgcattttcttagtggatgcagtaagtggacgagaaaatgacttaggaactcagccaagagtaattcgagttgctactcaaatatcactgagtgtccaccttgtacccaacacaataaatggaaacatctaccctcccttaatcaccattgcctacagtgacattgatatcaaagatgccaacagccagtctgtgaaggtttctttctcagtcacatatgaaatggatcatggagaagcacatgtccagacagatattgctttgggtgtattgggtgggctagctgttttagcatctcttttgaagacagcaggatggaagaggcgcattgggagtcccatgattgatttacagacagttgtgaaattcttggtgtactatgctggtgatctggccaatgttttctttatcatcacagtgggaacaggtctttactggcttattttcttcaaagcacagaagtctgtgtctgttttgctgccaatgccaattcaggaagaacgttttgtcacttatgttggatgtgcctttgctctgaaggcactacaatttttgcataagctcatatcccagattacaatagatgtattctttattgattgggagcgacctaaaggaaaggttcttaaagctgttgaaggtgagggtggtgtacgaagtgccactgttcctgtaagcatatggagaacatattttgtagcaaatgaatggaatgaaattcagactgtgagaaaaattaattcactctttcaagtacttactgtcctcttctttttggaggttgtgggattcaagaacttagcattaatggactcatcttctagtctttctagaaacccacctagctacatagctccttatagctgcattttgagatatgcagtgtctgctgctctttggctagccattggaattatacaggtcgtgttctttgctgtcttttatgagagatttatagaagataaaattcgacagttcgttgatttatgctctatgagtaatatatcagtgtttctgttatcccacaaatgttttggatattacattcatggtagatcagtacatgggcatgcagatactaatatggaagaaatgaatatgaaccttaaaagagaagcggaaaatttgtgtagccagagaggtttggtacccaacacagatggtcagacttttgagattgcaatttctaaccagatgagacaacattatgacagaattcatgagacactaataaggaaaaatggtcctgctagactactgagttcatcagcaagtacttttgagcagagtataaaagcatatcatatgatgaataaatttcttggctccttcattgaccatgttcataaggaaatggattactttataaaagataagttgcttcttgaaagaattcttggaatggaattcatggaaccaatggaaaaaagcatcttttacaatgatgaaggttattctttcagcagtgtcctgtattatggaaatgaagctactcttcttatttttgatctgctgttcttctgtgttgtggatttggcttgccaaaattttattttagcatccttccttacatatctacaacaagagatttttagatatatccgtaatacagtaggacaaaagaatttggcatccaaaacattggtggatcaaagatttttgatttaacttcctgaataaataacttaaagactcagtataatcatggccaaaaaaaagtcatgatatcaggttagtttgccatattttttaaaacttataatgcagactattctgtttttgttttttatttgcagaaagatttatttttataacttgggaatatataacctgatataatagaaaatactgttttcccattgtgtgtagtatttaatgcagtaaataataaattaatactgacagtgaggccaaaaaaaatctaaatgttgctttcagcataatactttttaatgctaattaaaacagtccccatcatttgtctctgtagattattttataaactgagagctgcctgaatcttctcacattgacaaagtaatttgattccaagtttaagactagttttcagtttgatattttcatgttttgtgtgcttatggttaaataaatgttgaaagatattttcaagtttacttagaaattttaaattgtattattgctgattcaatttgcatcattctaattgctcatcctctttggcagtggattaattcactgttgggttaatatgcatctcatgaaatgatatcttttcattcctttgtatacctgtattaggtcagtatacgctttccatgaaatatatttgcatttctaatatagtttacatttattaagttataacgtatgacatttttcccaatatcattttttatacattttaattacttaatgttttaagagttctcttccagagttttgcttttcaattacgtttaaagactgtaaataacaaacagtaaggctgggcgctgtggcttacgcctgtaatcccagcactttggaaggccaaggcacgtggatcactttaggtcaggagttcaagaacagcctggccaacatggaaaaccccatctctacaaaaaatacaaaaattagttggatgtggtggcctgtaatcccagctatttgggaggctgaggcatgagaatagcttgaaaccaggaggtggaggctgtagtgagccagatagcaccactgcactccagccaggatgacagagcaagaccctgtctcagaaaaaacaaaaacaaaacactgtaaatgtatcatgtttctcactgctttctatgttaatgctgtgtaaatacttaaaatggaatactgtataaatattatttatattttctcagatgaaaatatatactaaaacatttggtatttctgttttctgtttcattaatgtatatctgatggagtaccatttaggaatataacattattggggcagaggtcccagccattgccaaagttgaatcttttacatttccctgaatcttgaggatgactgaaaaggaagtctttgaaactgcagtttctgaaggatcacagtacaggaatgcctttataaaagctgcagagataaatacatgtacttatatggcatggatatttaaaaccactcactcagaagcatatgaaagaaattcaaccatcattcaacatagaagaagttaattttagtgcaaaagtttttaagtattaaatttcacaataaaggatcaattggcttacttgctgataaattaaaacagaaaacatttaaaatcattctaaattttgtatgatatttttattttggctaggtgcataaaaatgtgttcagattttcata

SEQ ID NO: 11 - protein, 543 aa, Homo sapiens
  source 1..543: note = GJA1 UNITPROT ID: Q969M2
MGDWNLLGGILEEVHSHSTIVGKIWLTILFIFRMLVLRVAAEDVWDDEQSAFACNTRQPGCNNICYDDAFPISLIRFWVLQIIFVSSPSLVYMGHALYRLRAFEKDRQRKKSHLRAQMENPDLDLEEQQRIDRELRRLEEQKRIHKVPLKGCLLRTYVLHILTRSVLEVGFMIGQYILYGFQMHPLYKCTQPPCPNAVDCFVSRPTEKTIFMLFMHSIAAISLLLNILEIFHLGIRKIMRTLYKKSSSEGIEDETGPPFHLKKYSVAQQCMICSSLPERISPLQANNQQQVIRVNVPKSKTMWQIPQPRQLEVDPSNGKKDWSEKDQHSGQLHVHSPCPWAGSAGNQHLGQQSDHSSFGLQNTMSQSWLGTTTAPRNCPSFAVGTWEQSQDPEPSGEPLTDLHSHCRDSEGSMRESGVWIDRSRPGSRKASFLSRLLSEKRHLHSDSGSSGSRNSSCLDFPHWENSPSPLPSVTGHRTSMVRQAALPIMELSQELFHSGCFLFPFFLPGVCMYVCVDREADGGGDYLWRDKIIHSIHSVKFNS

SEQ ID NO: 12 - DNA, 1652 bp, Homo sapiens
  source 1..1652: mol_type = genomic DNA; note = GJA1 Accession number: NM_032602
atgggggactggaacttattgggtggcatcctagaggaagttcactcccactcaaccatagtggggaaaatctggctgaccatcctcttcatcttccgaatgctggtacttcgtgtggctgctgaggatgtctgggatgatgaacagtcagcatttgcctgcaacacccggcagccaggttgcaacaatatctgttatgatgatgcattccctatctctttgatcaggttctgggttttacagatcatctttgtgtcttctccttctttggtctatatgggccatgcactttataggctcagggcctttgagaaagacaggcagaggaaaaagtcacaccttagagcccagatggagaatccagatcttgacttggaggagcagcaaagaatagatagggaactgaggaggttagaggagcagaagaggatccataaagtccctctgaaaggatgtctgctgcgtacttatgtcttacacatcttgaccagatctgtgctggaagtaggattcatgataggccaatatattctctatgggtttcaaatgcaccccctttacaaatgcactcaacctccttgccccaatgcggtggattgctttgtatccaggcccactgagaagacaattttcatgctttttatgcacagcattgcagccatttccttgttactcaatatactggaaatatttcatctaggcatcagaaaaattatgaggacactttataagaaatccagcagtgagggcattgaggatgaaacaggccctccattccatttgaagaaatattctgtggcccagcagtgtatgatttgctcttcattgcctgaaagaatctctccacttcaagctaacaatcaacagcaagtcattcgagttaatgtgccaaagtctaaaaccatgtggcaaatcccacagccaaggcaacttgaagtagacccttccaatgggaaaaaggactggtctgagaaggatcagcatagcggacagctccatgttcacagcccgtgtccctgggctggcagtgctggaaatcagcacctgggacagcaatcagaccattcctcatttggcctgcagaatacaatgtctcagtcctggctaggtacaactacggctcctagaaactgtccatcctttgcagtaggaacctgggagcagtcccaggacccagaaccctcaggtgagcctctcacagatcttcatagtcactgcagagacagtgaaggcagcatgagagagagtggggtctggatagacagatctcgcccaggcagtcgcaaggccagctttctgtccagattgttgtctgaaaagcgacatctgcacagtgactcaggaagctctggttctcggaatagctcctgcttggattttcctcactgggaaaacagcccctcacctctgccttcagtcactgggcacagaacatcaatggtaagacaggcagccctaccgatcatggaactatcacaagagctgttccattctggatgctttctttttcctttctttcttcctggggtgtgtatgtatgtttgtgttgacagagaggcagatggagggggagattatttatggagagataaaattattcattcgatacattcagttaaattcaattcataaaatagacttagaaaaatctt

SEQ ID NO: 13 - protein, 1241 aa, Homo sapiens
  source 1..1241: note = ATP2B4 UNITPROT ID: P23634
MTNPSDRVLPANSMAESREGDFGCTVMELRKLMELRSRDALTQINVHYGGVQNLCSRLKTSPVEGLSGNPADLEKRRQVFGHNVIPPKKPKTFLELVWEALQDVTLIILEIAAIISLVLSFYRPAGEENELCGQVATTPEDENEAQAGWIEGAAILFSVIIVVLVTAFNDWSKEKQFRGLQCRIEQEQKFSIIRNGQLIQLPVAEIVVGDIAQVKYGDLLPADGILIQGNDLKIDESSLTGESDHVKKSLDKDPMLLSGTHVMEGSGRMVVTAVGVNSQTGIILTLLGVNEDDEGEKKKKGKKQGVPENRNKAKTQDGVALEIQPLNSQEGIDNEEKDKKAVKVPKKEKSVLQGKLTRLAVQIGKAGLLMSALTVFILILYFVIDNFVINRRPWLPECTPIYIQYFVKFFIIGITVLVVAVPEGLPLAVTISLAYSVKKMMKDNNLVRHLDACETMGNATAICSDKTGTLTMNRMTVVQAYIGGIHYRQIPSPDVFLPKVLDLIVNGISINSAYTSKILPPEKEGGLPRQVGNKTECALLGFVTDLKQDYQAVRNEVPEEKLYKVYTFNSVRKSMSTVIRNPNGGFRMYSKGASEIILRKCNRILDRKGEAVPFKNKDRDDMVRTVIEPMACDGLRTICIAYRDFDDTEPSWDNENEILTELTCIAVVGIEDPVRPEVPDAIAKCKQAGITVRMVTGDNINTARAIATKCGILTPGDDFLCLEGKEFNRLIRNEKGEVEQEKLDKIWPKLRVLARSSPTDKHTLVKGIIDSTVGEHRQVVAVTGDGTNDGPALKKADVGFAMGIAGTDVAKEASDIILTDDNFTSIVKAVMWGRNVYDSISKFLQFQLTVNVVAVIVAFTGACITQDSPLKAVQMLWVNLIMDTFASLALATEPPTESLLKRRPYGRNKPLISRTMMKNILGHAFYQLIVIFILVFAGEKFFDIDSGRKAPLHSPPSQHYTIVFNTFVLMQLFNEINSRKIHGEKNVFSGIYRNIIFCSVVLGTFICQIFIVEFGGKPFSCTSLSLSQWLWCLFIGIGELLWGQFISAIPTRSLKFLKEAGHGTTKEEITKDAEGLDEIDHAEMELRRGQILWFRGLNRIQTQIDVINTFQTGASFKGVLRRQNMGQHLDVKLVPSSSYIKVVKAFHSSLHESIQKPYNQKSIHSFMTHPEFAIEEELPRTPLLDEEEEENPDKASKFGTRVLLLDGEVTPYANTNNNAVDCNQVQLPQSDSSLQSLETSV

SEQ ID NO: 14 - DNA, 8875 bp, Homo sapiens
  source 1..8875: mol_type = genomic DNA; note = ATP2B4 Accession number: NM_001001396
gagttagctagagctgttgccatgacaagcattttcttaagaaagctctgctgttgagatcgtccaaagctgggggctgggagggggggcacgaacttcgtggggcaccatccctccgaagagagcaagatcagagacacccgcccagctctcctgcaccctttttctttcaggaacctgagaggtccttcccattggaggggcagggggaggagacccagcccactccccggccttagccagaaaggcaagagagcaaagccagcgtctctagcttggttgccacactggggagactggtgggtggtcaccccaccctaccctcatccatggaaacccggagggagagtcccgcctgaagaaacctggatctttgctagaaagagagagatccagttgtcatcggtatccaggaagctctcctcttcctcctcctgacgtctactactacagttgctggttgttgctaaggttgctgccatggtaacatgcacatcctgtttacaccttcatctgggcaagttggtctaagctaggaacctacctaccctggacaactactatcatcaccacctggggacaccaatcatcgtgacacggagtccaccttccactcagttcccccatcctcttcctcctctcgctgccagacttcatacggaagaaaggatctagacttcggacggctactcgggagcttattgcacaagatatattcaatctattccctcactgggcccccagagaagcaagaagtaggaagaagttgagacagggaggcaggagacactggtcagttgaagggaaacgctacatcttctctggttgaggggcttggtaacagcaggcaaaatgacgaacccatcagaccgtgtcttgcctgccaactcgatggccgagagccgtgaaggggactttggctgcacagtaatggaactgaggaagctcatggagctgcgttcaagggatgcactgacccagattaatgtccactatggaggtgtacagaatctctgcagtagactgaaaacctcccctgtggaaggtctgtctgggaaccctgcagatctggagaaacgtaggcaggtgtttggacacaacgtgatcccccccaaaaagcccaagactttcttagaattagtgtgggaagctcttcaagatgtcacgcttatcatcctggagattgcagccatcatctccctggtcctgtccttttatcgccctgctggtgaagaaaatgaactgtgtggtcaagtcgcaactaccccagaagatgaaaatgaggcacaagctggctggattgagggggcagccatccttttctcagtgatcatcgtggtgttagtgactgcctttaatgattggagcaaagagaagcaattccgggggctgcagtgccgcattgaacaggagcaaaagttctccatcatccgaaacggtcaactcatccagctccctgtggctgagattgtggttggtgatattgcccaagtcaaatacggtgatctgctgcctgcagatggaatcctgatccaagggaatgatctgaagattgatgagagctctctgacaggggaatctgaccatgtcaagaagtccctggacaaagaccccatgttgctctcagggacccatgtcatggaaggttctggccggatggtggtgacagctgttggtgtcaactctcagactggaatcatccttactctcttgggggtcaatgaggatgacgaaggggagaaaaagaagaaaggtaaaaaacaaggagtccctgaaaatcgcaacaaagcaaagacccaagacggagtggccctggaaatccagccactcaacagccaggagggaatcgacaatgaggaaaaggacaagaaggcagtcaaggtgcctaaaaaggagaagtcagtgctgcagggcaagctgactcgcctggctgttcagattgggaaagccggtctgctcatgtctgctctcacggttttcatcctgattctatactttgtgattgacaactttgtgataaatcgcagaccatggctccctgagtgtactcccatctacatccagtactttgtcaagttcttcatcatcggcatcactgtactggtggtggctgtgccagaggggctgcctctggctgtcaccatctcactggcctactctgtgaagaaaatgatgaaagacaataacctagtacggcacttggatgcttgtgagaccatgggcaacgccaccgccatctgctctgataagacaggcacgttgaccatgaaccgcatgactgtggtacaagcttatattgggggcatccattaccgtcaaatcccaagccctgatgtcttcctgcccaaagtcctggacctcattgtcaatggcatttctatcaacagtgcttatacctccaagattctgcctccagagaaggagggaggcctgcctcggcaggtgggcaacaagaccgagtgtgctctgctaggctttgtcacagatctgaagcaggattatcaggctgtgcgtaatgaagtgcccgaggagaagctctacaaggtgtacacctttaactcagtgcgcaagtcaatgagcaccgtcatcaggaatcccaacggtggcttccgtatgtacagcaagggcgcctctgagatcatcttgcgcaagtgtaatcgaatcctggaccggaaaggggaagcagtgccattcaagaataaagacagagatgatatggtacgcactgtcatcgagcccatggcctgtgatggactccggactatctgcatagcttaccgggacttcgatgacacagagccctcttgggacaatgagaatgagatcctcaccgaactgacctgtatcgcggtggtgggcattgaggaccctgtgcgcccagaggtgccagatgctattgccaaatgcaaacaagctggcattactgtcagaatggtgacaggtgacaacatcaacacagcccgggccattgccaccaaatgtggcattctgacacctggggatgacttcctgtgcttagaaggcaaagaattcaaccggctcatccgcaacgagaaaggcgaggtagagcaagaaaagctggacaagatctggcctaagcttcgggtcctggcgcgatcttctcccactgacaagcacaccctggtgaaaggcataattgacagcactgttggggaacaccggcaggtcgtggctgtcactggtgatggcacaaatgacgggcctgctctgaagaaagcggatgttggttttgccatgggcatcgcaggcacagatgtagcaaaggaggcttcagacatcatcctaacagatgacaacttcaccagcattgtgaaggcagtgatgtggggacgaaatgtctatgacagcatctccaagttcctgcagttccagctcactgtcaatgtggtggccgtgattgtagccttcactggagcctgtatcactcaggattccccattgaaagctgtgcagatgttgtgggttaatctgatcatggacacttttgcttcattggccctggccacagagccccctacggaatctctgttgaagcggcgcccctatggccgaaataagcctctgatctcacgcactatgatgaagaacatcttgggccatgcattctatcagctcattgtcatctttatccttgtctttgcgggtgagaaattctttgatattgatagtgggaggaaggcacctctacattcaccacccagccagcactataccattgtttttaacaccttcgtgctgatgcagctcttcaatgaaatcaactcccgaaagatccatggagagaagaacgtcttttcaggcatctaccgcaacattatcttctgctctgtagtcttgggcacattcatctgccagattttcatcgtggaatttgggggtaaacccttcagttgtacaagcctcagcctgtctcagtggctgtggtgtctcttcattgggattggagaacttctgtggggccagttcatctccgcaatacctacccgatccctgaagttcctgaaggaggctgggcatggcaccaccaaagaggagatcaccaaggatgccgagggactggatgagattgaccatgctgagatggagctgcgccgaggccagatcctctggttccggggcctgaaccgtatccagactcagatcgacgtaattaacacattccagacgggagcctcttttaagggagtcctaaggcgacagaacatgggtcaacaccttgatgtaaaacttgttcctagttcatcctatgtagcagttgcaccagtcaaatcttcccccaccacttctgttcctgctgtttcatctcctcctatgggcaatcaaagtggtcaaagcgttccatagttccctccacgaaagcattcagaaaccctacaaccaaaagtccatccacagcttcatgacccaccctgaattcgccatagaggaggagttgccacgaacaccactcctggatgaggaagaggaggaaaatcctgacaaggcttctaagtttgggactagggtgctcctgttggatggtgaggtcactccatatgccaatacaaacaacaatgcggtggattgcaaccaagtgcagctcccccagtcggacagctctctacagagcctagagacatcagtttgaattttctttctctgactctcatccctattttacctatttccattttcgtctatcccatctatgaggtgatgatgggacttttcattgtcacgtcagctgctgtgttaacagcagtgtgtgtgaagtgaacctctacctgaccatgaagaggcaagagcacagacttacaaggatttcaacttaagcttgacttggggtttgtagcgggacccagtcaaaccccattcaggtcatggtagaatctactccttggtagtcacttgtcatttttaaagaaatgatgacaatcctcttggcatcaccccaccccacattctccccgatgttcctctcctgaattctggattttgtcctacaagtctgtgccatttataagctaagttgagggttcagagggagacaaatatccccaagtgaaatatgttgcggtagagatggaatgtataaaatccgccagtagtgtgattgtttttcaatttttcccactttgaaaacttacacctaaaggcctgtaggcctctaactctttctgccctttcattcaaacctctccaaagttctttgtcttttgtcttcccttcctttccttttttttttttttttttatgatgattaagaaaatggaaaggatatggatgaattgtgtaaacttagatccttctcccttttggcccaaaagaacccttgatttagttccagaatccaaccagtttctttgttaaaagggtccttttgaagcaattaagtgctggtaagaatatttctctgttgttgccaggttaccttctgcttttaaattgccatcttgtaaagtgtatgtggttcttaagtgccagggagatcagccttgcccatgaaggttgcatatgtgtggtatacagtttttacctgaaagcctgagctttctcttattcctaaagtggtggcaaaagaatgaactgggtatgaccctgcccccttactgggcttggatattgaggaccagacgctgccaaatctaggacaagacagaccatcaaagcagacttttgtgggctcctctttggggtgaccactgctttcaaagccatctgccaaggctctccagggcaggacctgactggtggggaatgagtgttcagaagccttgggagaggccaaagagccattctagcatgatctgagaaaaccttcctgcagaggccagaaaccttgagcttaggtgcctggggaccagcttcgacattctctccagtttctgattctaatttttgccacgtgtcacaacttttccagtctctgagaaggtcccagcctttctcaaatattctgattttgaaaatatgtatccaaagtgggaggcccctgtgacattttgccaacttaaacgagaaaaagaccccccgcacccggcacactcccccttcctccagccccgcttcagccacatgctccagctgctgcccagtaaagccctgtgcctttttttcccctgaatactgcccaaagcatccccttcccatctgcctctcaggagttggggactttgctaggagattttttaagtgttccttactgggacaacgtggagccacgtttgcaggagctccatttgtatccctgctggtgttgacttctgtgtaggggccagttcatgtccctgactctcacctcccattagataaatgaagcccacccccctttctagagtgatgagagtcaagaagaggggatgtatgaacggccaaattcccatgtgagaggaagatgacctgatccacctagccttttcttctggatctgtcctccctcacccctttcacctgagctgtccacagtaggaaacataaagaaacaatgtcccctacatatccccatgactacataatccatcatcgtaggaaataggaaagcaaatttgattttggttttgtaaaacgtacatgcttcaataattcttttttgtgtcttaaatactcataggggaaaaaaacagctcacccaaggtgttaggtttcacatatatattcatcaactattttagaagatttaattctatcaaatcttgtattacctcagatcattttaaatagcaagccaataacgagctttgaaggctattttaccattcctgttcacaaaaggttctcatggtgcctgacaggttacccttgagggcttgtgtctactttttaaaagtcaatggttttttttcttgtgttctagtttccataataggagagaaaatatagaaatatatgcaaaaattatagttttctttagatcagaaactgatatttttgggtcagccatatgtattttgtttaaaggatttaaaataaagtgccgtcatgtagccctgtggaagggagcacataaccagctgtttggcatgacaggtgacttagtatatttgtaattggttttaaaaccaatacaccatactttctttctgcaaacagccatctttatacttagggaagaaaaattgttgggttctagacttttttaatataaattttgttgatatggaattaggtaagtttaagtgtctatgtgcatatgttttttatataagttttttctattcagtttcactgatccaactggcagtgggtaaatatggcataagttaataacacttttccccaaaatggtgctttggatttgaaaagggtctgatggggagaaggagaacgtatcatcctagcttcctctcttaataaacctagaaaaacgggtagtaaactgtggatagtcaggaaaacacccagcaagggacacagctgtcaggaaatgaatcttccccccaacccccaccatgcagatggatagacagaatctttcctgactagtcattaggatcaggggcctctgttggatttgtgtttcttgaagaatagctggcagagtggtataaaagacacgaatatctcctggtctataaggatactctgatttggggtttgcatttttcatggtttttatttcctgttccccctggagttttccattagtgagtttttgtgcaaggatcttatttgtgatgccttccctcccctagaaagattttgtgcaatatattaaatggggacagaattctaaatggataaaacaatggctggttctagccctgagtgacagtcttaaggctagatccttcccatagtatcatctgtcctctggaatgactctcctgtccctaaaggggttaagagagagatcacctagaaatccctctggacacttgtgggttctttagggtttgagtttcttcttccccttgagcttcagagaggagagttggcatggttaaatctgaatggttacctcactgctgaaaacccagaggggcgtggcacactcgcttgtgtggaaaagcctctaaatgcatcccttcctttctttcctgcttcctttgccttacaattgaagcagcccgtggtaccatcacagtatgcagagacttcctcacctttcatatctagggaccacccccgatgcattggtgagggtgggcacttataaatgcctgctattgttaagccattccagcctcttcctctgaatagaccagacgccctttcacttagttcagtgccagtccttttgccttcccaaccctgctgttaggcctgctgttccctttgctcttgattaggagagatggaaggagatgagctcccataactgaattggcctttggttcatgttttctccccatatgtatatatgccatatgtgaatatgccatatatatgtgccaacaaatctatctacgttgttcttttcaaattagcacgcagataggaattttgagtttcttcttcttttagtaactagtataacaagcactggtatttttgtacaaaaaagaaaaacaaaagattgactattgtggtctgcatgacataaacaaacaaatggtgatatcaaagcaacgtataccccagtccagtgtgtgttgccataatttgcaattcagcttaacagtgcacccaatctatatttgcattttgatattatttaagctctatgtacaaggttttgcatgtatttatatggttcttagggaaaaaaaatgctataaactgcaaatctgaaattcaaatgtgttgttccactgagaccagaagaagaagaggagttttaaaagggataatttgttggagccaataaagctttttgctgatgaacagaaaccaatactgctgtgcactgagaataaaaactcatgcccacttgtaa

SEQ ID NO: 15 - protein, 412 aa, Homo sapiens
  source 1..412: note = CTSD UNITPROT ID: P07339
MQPSSLLPLALCLLAAPASALVRIPLHKFTSIRRTMSEVGGSVEDLIAKGPVSKYSQAVPAVTEGPIPEVLKNYMDAQYYGEIGIGTPPQCFTVVFDTGSSNLWVPSIHCKLLDIACWIHHKYNSDKSSTYVKNGTSFDIHYGSGSLSGYLSQDTVSVPCQSASSASALGGVKVERQVFGEATKQPGITFIAAKFDGILGMAYPRISVNNVLPVFDNLMQQKLVDQNIFSFYLSRDPDAQPGGELMLGGTDSKYYKGSLSYLNVTRKAYWQVHLDQVEVASGLTLCKEGCEAIVDTGTSLMVGPVDEVRELQKAIGAVPLIQGEYMIPCEKVSTLPAITLKLGGKGYKLSPEDYTLKVSQAGKTLCLSGFMGMDIPPPSGPLWILGDVFIGRYYTVFDRDNNRVGFAEAARL

SEQ ID NO: 16 - DNA, 2055 bp, Homo sapiens
  source 1..2055: mol_type = genomic DNA; note = CTSD Accession number: NM_001909
aactgcggcgtcatcccggctataagcgcacggcctcggcgaccctctccgacccggccgccgccgccatgcagccctccagccttctgccgctcgccctctgcctgctggctgcacccgcctccgcgctcgtcaggatcccgctgcacaagttcacgtccatccgccggaccatgtcggaggttgggggctctgtggaggacctgattgccaaaggccccgtctcaaagtactcccaggcggtgccagccgtgaccgaggggcccattcccgaggtgctcaagaactacatggacgcccagtactacggggagattggcatcgggacgcccccccagtgcttcacagtcgtcttcgacacgggctcctccaacctgtgggtcccctccatccactgcaaactgctggacatcgcttgctggatccaccacaagtacaacagcgacaagtccagcacctacgtgaagaatggtacctcgtttgacatccactatggctcgggcagcctctccgggtacctgagccaggacactgtgtcggtgccctgccagtcagcgtcgtcagcctctgccctgggcggtgtcaaagtggagaggcaggtctttggggaggccaccaagcagccaggcatcaccttcatcgcagccaagttcgatggcatcctgggcatggcctacccccgcatctccgtcaacaacgtgctgcccgtcttcgacaacctgatgcagcagaagctggtggaccagaacatcttctccttctacctgagcagggacccagatgcgcagcctgggggtgagctgatgctgggtggcacagactccaagtattacaagggttctctgtcctacctgaatgtcacccgcaaggcctactggcaggtccacctggaccaggtggaggtggccagcgggctgaccctgtgcaaggagggctgtgaggccattgtggacacaggcacttccctcatggtgggcccggtggatgaggtgcgcgagctgcagaaggccatcggggccgtgccgctgattcagggcgagtacatgatcccctgtgagaaggtgtccaccctgcccgcgatcacactgaagctgggaggcaaaggctacaagctgtccccagaggactacacgctcaaggtgtcgcaggccgggaagaccctctgcctgagcggcttcatgggcatggacatcccgccacccagcgggccactctggatcctgggcgacgtcttcatcggccgctactacactgtgtttgaccgtgacaacaacagggtgggcttcgccgaggctgcccgcctctagttcccaaggcgtccgcgcgccagcacagaaacagaggagagtcccagagcaggaggcccctggcccagcggcccctcccacacacacccacacactcgcccgcccactgtcctgggcgccctggaagccggcggcccaagcccgacttgctgttttgttctgtggttttcccctccctgggttcagaaatgctgcctgcctgtctgtctctccatctgtttggtgggggtagagctgatccagagcacagatctgtttcgtgcattggaagaccccacccaagcttggcagccgagctcgtgtatcctggggctcccttcatctccagggagtcccctccccggccctaccagcgcccgctgggctgagcccctaccccacaccaggccgtcctcccgggccctcccttggaaacctgccctgcctgagggcccctctgcccagcttgggcccagctgggctctgccaccctacctgttcagtgtcccgggcccgttgaggatgaggccgctagaggcctgaggatgagctggaaggagtgagaggggacaaaacccaccttgttggagcctgcagggtggtgctgggactgagccagtcccaggggcatgtattggcctggaggtggggttgggattgggggctggtgccagccttcctctgcagctgacctctgttgtcctccccttgggcggctgagagccccagctgacatggaaatacagttgttggcctccggcctcccctc

SEQ ID NO: 17 - protein, 2390 aa, Homo sapiens
  source 1..2390: note = SPTBN2 UNITPROT ID: O15020
MSSTLSPTDFDSLEIQGQYSDINNRWDLPDSDWDNDSSSARLFERSRIKALADEREAVQKKTFTKWVNSHLARVTCRVGDLYSDLRDGRNLLRLLEVLSGEILPKPTKGRMRIHCLENVDKALQFLKEQKVHLENMGSHDIVDGNHRLTLGLVWTIILRFQIQDISVETEDNKEKKSAKDALLLWCQMKTAGYPNVNVHNFTTSWRDGLAFNAIVHKHRPDLLDFESLKKCNAHYNLQNAFNLAEKELGLTKLLDPEDVNVDQPDEKSIITYVATYYHYFSKMKALAVEGKRIGKVLDHAMEAERLVEKYESLASELLQWIEQTIVTLNDRQLANSLSGVQNQLQSFNSYRTVEKPPKFTEKGNLEVLLFTIQSKLRANNQKVYTPREGRLISDINKAWERLEKAEHERELALRTELIRQEKLEQLAARFDRKAAMRETWLSENQRLVSQDNFGLELAAVEAAVRKHEAIETDIVAYSGRVQAVDAVAAELAAERYHDIKRIAARQHNVARLWDFLRQMVAARRERLLLNLELQKVFQDLLYLMDWMEEMKGRLQSQDLGRHLAGVEDLLQLHELVEADIAVQAERVRAVSASALRFCNPGKEYRPCDPQLVSERVAKLEQSYEALCELAAARRARLEESRRLWRFLWEVGEAEAWVREQQHLLASADTGRDLTGALRLLNKHTALRGEMSGRLGPLKLTLEQGQQLVAEGHPGASQASARAAELQAQWERLEALAEERAQRLAQAASLYQFQADANDMEAWLVDALRLVSSPELGHDEFSTQALARQHRALEEEIRSHRPTLDALREQAAALPPTLSRTPEVQSRVPTLERHYEELQARAGERARALEAALALYTMLSEAGACGLWVEEKEQWLNGLALPERLEDLEVVQQRFETLEPEMNTLAAQITAVNDIAEQLLKANPPGKDRIVNTQEQLNHRWQQFRRLADGKKAALTSALSIQNYHLECTETQAWMREKTKVIESTQGLGNDLAGVLALQRKLAGTERDLEAIAARVGELTREANALAAGHPAQAVAINARLREVQTGWEDLRATMRRREESLGEARRLQDFLRSLDDFQAWLGRTQTAVASEEGPATLPEAEALLAQHAALRGEVERAQSEYSRLRALGEEVTRDQADPQCLFLRQRLEALGTGWEELGRMWESRQGRLAQAHGFQGFLRDARQAEGVLSSQEYVLSHTEMPGTLQAADAAIKKLEDFMSTMDANGERIHGLLEAGRQLVSEGNIHADKIREKADSIERRHKKNQDAAQQFLGRLRDNREQQHFLQDCHELKLWIDEKMLTAQDVSYDEARNLHTKWQKHQAFMAELAANKDWLDKVDKEGRELTLEKPELKALVSEKLRDLHRRWDELETTTQAKARSLFDANRAELFAQSCCALESWLESLQAQLHSDDYGKDLTSVNILLKKQQMLEWEMAVREKEVEAIQAQAKALAQEDQGAGEVERTSRAVEEKFRALCQPMRERCRRLQASREQHQFHRDVEDEILWVTERLPMASSMEHGKDLPSVQLLMKKNQTLQKEIQGHEPRIADLRERQRALGAAAAGPELAELQEMWKRLGHELELRGKRLEDALRAQQFYRDAAEAEAWMGEQELHMMGQEKAKDELSAQAEVKKHQVLEQALADYAQTIHQLAASSQDMIDHEHPESTRISIRQAQVDKLYAGLKELAGERRERLQEHLRLCQLRRELDDLEQWIQEREVVAASHELGQDYEHVTMLRDKFREFSRDTSTIGQERVDSANALANGLIAGGHAARATVAEWKDSLNEAWADLLELLDTRGQVLAAAYELQRFLHGARQALARVQHKQQQLPDGTGRDLNAAEALQRRHCAYEHDIQALSPQVQQVQDDGHRLQKAYAGDKAEEIGRHMQAVAEAWAQLQGSSAARRQLLLDTTDKFRFFKAVRELMLWMDEVNLQMDAQERPRDVSSADLVIKNQQGIKAEIEARADRFSSCIDMGKELLARSHYAAEEISEKLSQLQARRQETAEKWQEKMDWLQLVLEVLVFGRDAGMAEAWLCSQEPLVRSAELGCTVDEVESLIKRHEAFQKSAVAWEERFCALEKLTALEEREKERKRKREEEERRKQPPAPEPTASVPPGDLVGGQTASDTTWDGTQPRPPPSTQAPSVNGVCTDGEPSQPLLGQQRLEHSSFPEGPGPGSGDEANGPRGERQTRTRGPAPSAMPQSRSTESAHAATLPPRGPEPSAQEQMEGMLCRKQEMEAFGKKAANRSWQNVYCVLRRGSLGFYKDAKAASAGVPYHGEVPVSLARAQGSVAFDYRKRKHVFKLGLQDGKEYLFQAKDEAEMSSWLRVVNAAIATASSASGEPEEPVVPSTTRGMTRAMTMPPVSPVGAEGPVVLRSKDGREREREKRFSFFKKNK

SEQ ID NO: 18 - DNA, 11136 bp, Homo sapiens
  source 1..11136: mol_type = genomic DNA; note = SPTBN2 Accession number: NM_006946
ataattccttcctctcctaagcaggcagcagttcaccttggttaaggaccttggaccttagaccactcagacgctaacaaaccaaggagaaacccagccgtgtcaggcctagaaatgtctgcccccacccccacccccctcaagacggtgactaggccggaattctcctggttgataaatgagaggagctgagaagcgctgagatgcctgtttggagcatctgatctgtagaagacgaatcttcactgtgccatggagatgttctgggagggagagccggcccagctgcctgaaggaggacgcgagagcgaggggacgggtgagaggaatgcttagcggagacggactggaggtgcccggagaggaaaggggaacggaggctggatctcgggaaacctcgtcggcagtgtcattagaggaaggatcgcgtgtctcggggatacggattttggaggaaaagcagaatagggacaaaggcttcccaggtggcttcccctcttcccctgggggctgatttccactgagcagccaaccgcagcctctggccacaaggagagcggagcacaggagcaggaagccgcctaccaccatgagcagcacgctgtcacccacagactttgacagcttggaaatccagggccagtacagtgacatcaacaaccgctgggaccttcctgactcggactgggacaatgacagcagctcggcccgcctctttgagaggtctcgcattaaggctctggcagatgaacgagaagctgtgcagaagaaaaccttcaccaagtgggtaaactcgcacctggcccgggtcacgtgccgggtgggggacctgtacagcgacctccgggacggacgcaacctgctgaggctcctcgaggtgctctcgggagagatactgccaaagcctacaaagggccgcatgcggatccactgcctggagaacgtggacaaggcactgcagttcctcaaggagcagaaagtgcacttggaaaacatgggctcccatgacattgtggacggaaaccaccgactgacccttgggctggtctggaccatcatccttcgattccagatccaagacatcagtgtggagacagaagacaacaaggagaagaagtcagccaaggatgccctgcttctgtggtgccagatgaagactgcaggttatcccaacgtcaatgtacacaacttcaccaccagctggagagatggactagctttcaacgccatcgtgcataaacaccggccagacctgctggattttgagtctctgaagaagtgtaatgcacactataatctgcagaatgcattcaatctggctgaaaaggaactgggacttaccaagctgctggatcccgaagacgtgaatgtggaccagccagatgagaagtcaatcattacctatgtggctacttactaccattacttctccaagatgaaggccctggccgtggaaggcaagagaattggcaaggtgctggaccatgccatggaggcagagcgcctggtggagaaatacgagtccctggcctcggagctgctgcagtggatcgagcaaacgatcgtgaccctcaatgaccggcagttggccaactcccttagcggggtccagaaccagctgcagtccttcaactcctaccgcaccgtggagaagccgcccaagtttaccgagaaagggaacttggaagtgctgctcttcaccatccagagcaagcttcgggccaacaaccagaaggtctacacgccccgcgagggccggctcatctcggacatcaacaaggcttgggagcggctggagaaggcggagcacgagcgtgagctggccctgcgcaccgagctcatccgccaggagaagctggagcagctggccgcccgcttcgaccgcaaggctgccatgcgggagacctggctcagcgagaaccagcgcctcgtgtcccaggacaactttgggctggagctggcagctgtcgaggcagcagtacggaagcacgaagccattgagacggacatcgtggcctacagcggccgggtgcaggcagtggacgccgtggctgcagagctggccgccgagcgctaccacgacatcaagcgcatcgccgctcggcagcacaacgtggcacggctctgggacttcttgcggcagatggtggccgcccggcgggagcggctcctcctcaacctggagctgcagaaggtgttccaggacctgctctacctcatggactggatggaagagatgaagggccggctgcagtctcaggacctgggcaggcacctagcaggagtggaggacctgctgcagctgcacgagctggtggaggcagacatcgccgtgcaggccgagagggtgcgggccgtcagcgcctctgccctgcgcttctgcaacccagggaaagagtatagaccttgcgacccgcagctggtgtcggagcgggtggccaagctagagcagagctatgaggcactgtgcgagttggcagcggcgcggcgggcccggctggaggaatcacggcggctctggcgtttcctctgggaggtgggtgaagctgaggcctgggtgcgggagcagcagcacctcctggcctcagccgacacgggccgagacctgaccggtgccctccgcctgctcaacaagcacacagccctgcggggcgagatgagcggccggctggggcccctgaagctcaccctggagcagggccagcagttggtggccgagggtcaccctggggcaagccaggcctctgcccgtgcagctgaactccaagcccagtgggagcggctagaggccctggccgaggagcgtgcccagcggctggcccaagccgccagcctctaccagttccaggccgatgcaaacgacatggaggcctggttggttgacgcactgcgcctggtgtccagccccgagctggggcacgacgagttctccacgcaggctctagccaggcagcatcgggccctggaggaggagattcgaagccaccggccaaccctggacgccttgagggaacaggcagcagccctgccccccacactgagccgcacgcccgaggtgcagagccgggtgcccaccctggagcggcactacgaggagctgcaggcccgggcaggcgagcgagcgcgggccttggaggcagccctggcgctctacaccatgctcagcgaggccggggcctgtggactctgggtggaggagaaggagcagtggctcaacgggctggccctgcctgaacgcctggaggacctggaggtcgtgcagcagaggttcgagaccctggagcctgaaatgaacacccttgcagcacaaatcaccgcggtgaatgacattgccgagcagttactgaaggccaaccccccaggcaaagaccgcattgtcaacacccaggagcagctcaaccacaggtggcagcagtttcggcgtctggcagacggcaagaaggcagctctcacctcagccctgagcatccagaactaccacttagagtgcacggagacccaggcctggatgagagagaagaccaaagtcatcgagtccacccagggcctaggcaacgatctggctggggtgctggccctgcagcgcaagctggccggcacggagcgggacctggaggccatcgccgcccgggtgggcgaactgactcgagaggcaaatgccctggctgccggccatcccgctcaggcagtggccatcaacgcccggctgagagaggtgcagaccggctgggaggacctcagggccaccatgcggcgtcgagaagagtcgctgggggaggcgcggcggctgcaggacttcttgcgcagcttggatgacttccaggcctggctaggccgcactcagactgctgtggcctctgaagaagggccggccaccctgcctgaggcagaggccctcctggcccaacatgcagccctgcggggagaggtggagcgggcccagagcgagtatagccggctgcgagccctgggcgaggaggtgacccgggaccaggctgacccccagtgcctcttcctacgacagcgactggaggccctgggaactggctgggaggagctgggccgaatgtgggagagccggcaaggtcgcctggcccaggcccacggcttccagggattcctgcgggatgctcgtcaggctgagggcgtgctcagcagccaggaatatgttctgtctcacacggagatgccagggacactccaggctgctgatgctgccattaaaaaactggaggacttcatgagcaccatggacgccaatggggaacggatccacgggctcctggaggctggccgccagctggtatctgaaggcaacatccacgccgacaagattcgggaaaaggcagactccattgagaggaggcacaagaagaatcaagacgcagcgcagcaatttctgggccgtcttcgggacaaccgggagcagcagcatttcctgcaagattgtcacgagctgaagctctggatcgacgagaagatgctgacagcccaggacgtgtcctatgacgaggcccgcaacctgcatactaagtggcagaagcaccaggcattcatggccgagctggctgccaacaaagactggctggacaaggtggacaaggaagggcgagagctcacccttgagaagccagagctgaaagccctggtgtcggagaagctgagagacctgcacaggcgctgggacgagctggagaccaccacccaagccaaggcccgcagcctctttgatgccaaccgagctgagctgtttgcccagagctgctgtgccctggagagctggctggagagcctgcaggcccagctgcactcggatgactacggcaaggacctcaccagcgtcaacatcctgctcaagaagcagcagatgctggaatgggagatggctgtgagagagaaggaggtggaggcaatccaggcccaggccaaagcactggcccaggaggaccagggtgcaggggaggtggagagaacctcgagggccgtggaggagaagttcagggccttgtgccagcccatgcgggaacgctgccggcgcctgcaggcttctcgcgagcagcaccagttccaccgcgatgtggaagatgagattttgtgggtgacagagcggctgcccatggccagctccatggagcatggcaaggacctgcccagcgtccagcttctcatgaagaaaaaccagaccctgcagaaagagattcagggccatgagccccggatcgcggacctgagggagcggcagcgtgctctaggtgcagcagcagcaggtccagagctggctgagctgcaggaaatgtggaaacgcctgggccacgagctggaacttcgagggaagcgactggaggatgccctgcgagcccagcagttctaccgcgatgccgccgaggcggaggcctggatgggcgagcaggaattacacatgatgggccaggagaaggccaaggatgagctgagtgcccaggcagaggtgaagaagcaccaggtgctggagcaagccctggccgactacgcgcagaccatccaccagctggcggccagcagccaggacatgattgaccacgagcacccagagagcactcggatatccatccgccaagcccaggtggacaagctgtatgccggcctgaaggagctggctggagagcggcgggagcgcctgcaggagcacctccggctgtgccagctccgccgcgagctggatgacctggaacagtggatccaggagcgcgaggtggtggcggcctcccacgagctgggccaggactacgagcatgtgactatgctccgagacaaattccgagagttctcccgggacacaagcaccatcggtcaggagcgcgtagatagcgccaatgcgctggccaatgggctcattgctgggggccatgctgcacgggccaccgtggccgagtggaaggacagtctcaacgaggcctgggctgacctgcttgagctgctggacacacggggtcaggtgctggccgcggcgtacgagctgcagcgcttcctgcacggggcacgccaagccctggcgcgggtgcagcacaagcagcagcagcttccggacgggactggccgcgacctcaacgctgccgaggccctgcagcgccgacactgtgcctacgagcatgacattcaggccctcagcccccaggtccagcaggtgcaggacgacggccaccggctccagaaggcctacgctggagacaaggctgaggagatcggccgccacatgcaggccgtggccgaggcctgggcccagcttcagggaagctctgccgcccgccggcagctgctgctggacaccacagacaagttccgcttcttcaaggctgtccgggaactgatgctctggatggatgaggtcaacctgcagatggatgcccaggagcgtccccgggatgtgtcctccgcggatctagtcatcaagaaccagcaaggcatcaaggcagagatagaggcccgggcagaccgcttctcctcctgcatcgacatggggaaggagctgctggccaggagccactatgcggccgaggagatctcagagaagctgtctcagctgcaggcacggcgccaggagacagctgagaagtggcaggagaagatggactggcttcagctggttttggaggtgcttgtgtttggaagagatgcagggatggcagaggcctggctctgcagccaggagccactggtgcgcagcgctgagctgggttgcacggtcgacgaagttgagagcctcatcaagcggcacgaggccttccagaagtcagcagtggcctgggaggagcgattctgtgcgctggagaagcttactgcgctagaggagcgggagaaggagcgaaagagaaagagggaggaggaggagcggcggaaacagccgcctgctcccgaacccacagccagtgtgcctccaggggacctggtgggcggccagacagcttctgacaccacctgggacggaacccagccacggccaccaccatccacacaagcacccagtgttaatggagtctgcacagatggagagccctcacagcccctgctgggacaacagagacttgagcacagcagcttccccgaagggccgggacctggctcaggggacgaagccaatgggccccggggagagaggcagacccggactcggggcccggccccatctgcaatgccccagagcaggtctaccgagtcagcccatgctgccaccctgccgcctcgaggcccagagccatctgcccaggagcagatggaggggatgctgtgccgcaagcaggagatggaggccttcgggaagaaggctgccaacaggtcctggcagaacgtgtactgtgtcctgcggcgtgggagcctcggcttttacaaggatgccaaggcagccagcgcgggagtgccataccacggagaagtgcctgtcagcctggccagggcccagggcagcgtcgcctttgattaccgaaagcgcaaacatgtcttcaagctgggcttacaggatggaaaagaatatttattccaggccaaggatgaggcagagatgagctcgtggctacgggtggtgaatgcagccattgccacagcgtcttctgcctctggagagcctgaagagccggtggtgcccagcaccacccggggcatgacccgggccatgaccatgcccccagtgtcacccgtcggggctgaggggcctgttgtgctccgcagcaaagacggcagagaacgagagcgagaaaaacgcttcagcttctttaagaagaacaagtagttgggggcaaggtcccaggccaactccctccctccgttcaggaaactgccagggacagtcgacagggaccgccctcttgtcaggacaactgcctgctgctagggtctgttgccaaggtcaacccatcaccaggaactgtcactggggacgagtccatgttcccaagggcagcccttctcttctgctgtttaattccagactggtggtgggacccaggtaaccccctctcccacccccgccgacttctcccctttccccagcctcgtgcctctgtccctcaccacggtgtggacagtgccgcaccctcaacataggccatgtggggagtggctgcccctgcctcagggtcattctcctgccatgcgagggcactcgccttctgccttctggttcctcacccctcagaccagccaggaacctctcagagctgaagcaggccctgggggcagaagtgccagatgacagtcagaggcgcaggagccctccctccccacccccaccctgtaactccagctgccactccatctccagctgctctcaatggcttccaggtgtgttgttcggggacagccaccgccttgagtctggccaaggaggtgattaaacagctcagcttctctcaccgcctctgggtgtctttgctttcctgaccacagcctctctgcccaagcctgtgtcctctccttccgttctggtctccttcatctcacgtttccccagcctccaagctcttgaagagccgtgtcacactgagagcttccctgacctggtctcatttccctctgacagtgacctccagtgtgctgggttgaccaatgccaagcctctttttaaaccaaagtagttcaccatgggttgggatgatgtcaacaagcagtattcatgttaaaaagcaatgagggactccttccctggtgcacaattttcttcacttgtgatctctaaactgttttcaaattggaagactgggaagcattgctacagccccagccagtctcagccactgctcagcccagtggtggaaagctgagcacacagcgggtgcttactgcccccacttgccgtctgctctccagtagatcaagggacctcagacagggatctgagaagtggcaggttccaataaactgatcaacagaatgaagtcactctgggaagccatgaggtgactttacagcccaagcatgtaaatatacacacagaggataatatatattcttttttttttttttttttgagacagagtctcactctgtcagccaagctggactgcagtggcgcaatcacagcccattgcaacctccacctcctgggttcaagcaatcctcccacctcagcctcccgagtagcctgaaccacaggcacatgccatcatacccgactaagtctgtttgttttttgtagagacggggtctcactatgttgcccaggtcggtctcgaattcctgggcccaagtgattctctcaccttggcctcaaactgttgggattacaggcgtgagccaccatgcccagctgagactaccttctggatctgatgaagtattagaaaggagcgggtggcttctcctttgtctctggtttggcaatcggagctttcagggcacagtgtttgtctccagatgttgatggaagtgggcactccttggtggcctccaacaggaaaagcgtgttctttcattgtttcctatacacacagacaaccgtttttccaggaaggcagccccatctttagtcattgactgcgggcctatcatcagtcatgacgaagaccgagttaggtgtgtgcaggcccagaactagcacatcacagccccagagtgggctccaaaccggtagaccagagagcctgcaggataatttcccccttaagatgggtagatttactgttccacagccaacaggtggatacgcgtaactagaacaatctgtcatgggactaagtggaagaatccatcagcactacacagcatcttttcttcaaatacaactgtaaaatctccactgaagagacagtcataccttgggggtgctcagggaatctaggtatttgcactccaagctggcaagcctgggggcactgaagggaaacaataattggaaatgtcagaaggaaatgtatatggagaaattaatagagaaatgattattttaacacgacacgtaagtgtaaataggacagccaattgaagcagtcctgcagtaggggcaggcattgtcaacggagaggtgagactgaagaccccgagcagcatctgcatatgcggcagcaggacttcagggcatgattccttaagaacaggacatagaagaggggaagcatagtgtcaggaattaagtcagaaaacaccttcagctgtgagtggaagaaagaaaaaattccaggaaagacaacaggatggaatggggcggtgagggctatgagacaagttagacacaaaaatacaataaatgcaggcagcacaaatcaatggagagagatggcagataaaaatggattacttgggccgggcgcggtggctcacgcctgtaatcccagcactttgggaggccgaggcgggcggatcacgaggtcaggagatcgagaccatcccggctaaaacggtgaaaccccgtctctactaaaaatacaaaaattagccgggcgtagtggcgggcgcctgtagtcccagctacttgggaggctgaggcaggagaatggcgtgaacccgggaggcggagcttgcagtgagccgagatgccgccactgcgctccagcctgggtgacagagcgagactccatctcaaaaaaaaaaaaaaaaaaaaaatggattacttggccaggcatggtggttcacgcttataatcccagcactttgggaagccgaggtgagtgggtcacttgagctcaggagttcaagaccagcctgggcaacatggtgaaaccccatctctacaaaaattagccaggtgtagtggcatgtgcctgtagtctcagctacttgggaggctgaggcaggagcattgcttgaacctgggaagcagaggttacagtgagccgagatcatgccactgcactccagtctaggcaataaagtgagaccctgtctcaaaaaaaaaaaaataggattatgtagagaaaaatatatttgcattcttaacatcacctacaagagtggactttaggtccatgctgtccacagcagcagccacccagccatgtgtggctactgagatgtagccaaaccaagtgtgtcatgactctgaaacaccaggtatgaagcatggaagaggacaacaactttaaataccttaatttttatattgattatgtgttgaaataatattttagatatattgggtttcaaaagtatcattaaagtgaatttcaacta

SEQ ID NO: 19 - protein, 373 aa, Homo sapiens
  source 1..373: note = ARFIP1 UNITPROT ID: P53367
MAQESPKNSAAEIPVTSNGEVDDSREHSFNRDLKHSLPSGLGLSETQITSHGFDNTKEGVIEAGAFQGSPAPPLPSVMSPSRVAASRLAQQGSDLIVPAGGQRTQTKSGPVILADEIKNPAMEKLELVRKWSLNTYKCTRQIISEKLGRGSRTVDLELEAQIDILRDNKKKYENILKLAQTLSTQLFQMVHTQRQLGDAFADLSLKSLELHEEFGYNADTQKLLAKNGETLLGAINFFIASVNTLVNKTIEDTLMTVKQYESARIEYDAYRTDLEELNLGPRDANTLPKIEQSQHLFQAHKEKYDKMRNDVSVKLKFLEENKVKVLHNQLVLFHNAIAAYFAGNQKQLEQTLKQFHIKLKTPGVDAPSWLEEQ

SEQ ID NO: 20 - DNA, 3311 bp, Homo sapiens
  source 1..3311: mol_type = genomic DNA; note = ARFIP1 Accession number: NM_014447
ctcctcacttccggcttcgctgctcttggttctggttctggaggctgggttgagaggtcgccggtccgactgtcctcggcggttggtcagtgtgaatttgtgacagctgcagttgctccccgcccccgagcagccgaggagtctaccatggctcaagaatctcccaaaaattcagcagcagaaattccagtgactagtaatggagaagttgatgactctcgtgaacatagctttaatagggatttgaagcattcattaccatctggacttggtctctcagaaacccaaattacatctcatggctttgacaataccaaagagggtgttattgaagcaggagcatttcaaggtggccagagaacacagacaaaaagtggaccagttattctagcagatgaaattaaaaatcctgcaatggaaaagttagaacttgttagaaaatggagtctaaacacctataagtgtactcgacagattatctctgagaagctaggccgtggctcaagaactgtggaccttgaacttgaagctcagattgatatattaagggataacaagaaaaaatatgaaaatattttaaaactggctcaaacattgtcgacccagcttttccagatggtacatacccaaaggcaacttggagatgcatttgctgacctgagtttgaagtcactagaacttcatgaagaatttggctataatgccgatacccagaaactgctggctaaaaatggagagactcttcttggggccattaattttttcattgctagtgtgaacactttggtgaataaaaccattgaagatacattaatgactgtgaaacagtatgaaagtgccaggattgaatatgatgcatatcgcactgatttggaagaactgaatcttggaccacgtgacgcaaacactctgccaaagattgagcagtcacagcatctcttccaagcacataaggaaaaatatgataaaatgcgcaatgatgtttctgtcaaattgaaatttctagaagaaaataaggttaaagtattgcacaatcagctggtccttttccacaatgccattgccgcttactttgctgggaatcagaagcagcttgaacagacacttaaacagttccatatcaaattgaaaacccctggagtggatgccccatcttggcttgaagaacagtaaaatcacagcggaaaataaaaagaaagtcgcgttgttatatttctaaaccaacctaacaagaattaagcagagttgggggaagtgggaggggtgacaagcattatagtgattcttgcacaaacagctttaatttttccctttttcatactttaacaattgaactgttaagggtggttttaatgtaaacatagtttctataatctgaacacaataattttcctttttgagaaatccttttgtattgtgagggttgatggctatttctgtagtttgaaaacatctaatagagatttgcactgacaagataaaaattcaaggtttttggtcctggaaatgagggccgattgtaacttttccaaagggaggtttacatgatttgtatcaacatcagatattttatatgtgaatatattaaacatctttaagagattcattttcatgtattaaagaaaaaagaaactattttgcagagtaaagttatatggtgttcctgcagcgtccacacagaggcagcagctctaatgaatgattagcttgtggagttgtggcaaatacctttttaaaaatgaatctgtaccactgtaattttatttagacttttttttaaagacacagaaatcacactgtcatttctgtgaggcttttaagcttatgaatttgcttcacccgaagtcattggacagttacatttgcaatttcttttggttcataacaaaacctgcttaagagaatttttttttttgacaggtggacgtgggaatggaaattcttaatggtttctggagtagaaatctgtacttagaaaactagtttttgggtcagttccattttgatagaagtgaatacatagacagcttttattgacttccatatgtaacaataccgtttaagccttaaatcacagatatgtgccttctcagatacagtaattcttgttcaaccaatgtacaaaatccataaagaaacccctgttggataatgtttgatgtgtctattccttccatggaatggagcactatgtatgaatgttgggtttctttgtacttgttaagccacatttgaggtttatggtaaaaatcatcttttgagtttgctctttggtttttcttcattccttttgaggattgggaaaacagaaagattctttgatttgggtaatgaagaggtaatttgggacagtgtggtggtaccaggaagaaagaggattggaaaggccagtactgttttagttgctcggcactgttggttttgttttaatgtggttgccctgtccactacatggttctatcagtagtgtaatccattttcaatgtaaagctcttttagtttttgtcatagacataaattaatattttgagaggcatccctcacctgttcatttcttctgtgttgaaatgaagtacttaaaattaccgttatacatgaactttgtggactgtaagatttgttatatatgttcaaatgccttttagctggctttttaattaatatgcctgttttgagtgcttaatacaatgtaatgtgattgtaaatcatacctattttaaatcattccttcctgtatatttgtactcagagagccttattttattcttccagcagaattactacttgtgatagttcatttacattccccagaatgtgcctctagtgtgaattttgtattcttattaaacgtgtttgctgcagtaaatcgtttctctggaccttcatagtttaagaagtaactatttggaaattctgaagacacataatttgcgttttctgaaccttaaaaaaaaaggtacttctgtcacttataattgttttagctcagtaagctattttttttcaatgtgaatctcttttgagagctgaacatgtccattcttaaccacatttcaataacagttactgtagctaaggagctaaatagtttcatggattaatttttttcagaataaatttaaaatatccatgattctgatagtgggcacatgaccaaaagaaaaaagtaaatcaatatatttagccaatggtacatttactttgttaggaatgtaatttatgttcattatagaaaagaattagaagaaaatttcaagtaatagaagataagtaccttcccaagtgaataaatactgcatggaaccactcaa

SEQ ID NO: 21 - protein, 1907 aa, Homo sapiens
  source 1..1907: note = MIA3 UNITPROT ID: Q5JRA6
MAAAPGLLVWLLVLRLPWRVPGQLDPSTGRRFSEHKLCADDECSMLMYRGEALEDFTGPDCRFVNFKKGDPVYVYYKLARGWPEVWAGSVGRTFGYFPKDLIQVVHEYTKEELQVPTDETDFVCFDGGRDDFHNYNVEELLGFLELYNSAATDSEKAVEKTLQDMEKNPELSKEREPEPEPVEANSEESDSVFSENTEDLQEQFTTQKHHSHANSQANHAQGEQASFESFEEMLQDKLKVPESENNKTSNSSQVSNEQDKIDAYKLLKKEMTLDLKTKFGSTADALVSDDETTRLVTSLEDDFDEELDTEYYAVGKEDEENQEDFDELPLLTFTDGEDMKTPAKSGVEKYPTDKEQNSNEEDKVQLTVPPGIKNDDKNILTTWGDTIFSIVTGGEETRDTMDLESSSSEEEKEDDDDALVPDSKQGKPQSATDYSDPDNVDDGLFIVDIPKTNNDKEVNAEHHIKGKGRGVQESKRGLVQDKTELEDENQEGMTVHSSVHSNNLNSMPAAEKGKDTLKSAYDDTENDLKGAAIHISKGMLHEEKPGEQILEGGSESESAQKAAGNQMNDRKIQQESLGSAPLMGDDHPNASRDSVEGDALVNGAKLHTLSVEHQREELKEELVLKTQNQPRFSSPDEIDLPRELEDEVPILGRNLPWQQERDVAATASKQMSEKIRLSEGEAKEDSLDEEFFHHKAMQGTEVGQTDQTDSTGGPAFLSKVEEDDYPSEELLEDENAINAKRSKEKNPGNQGRQFDVNLQVPDRAVLGTIHPDPEIEESKQETSMILDSEKTSETAAKGVNTGGREPNTMVEKERPLADKKAQRPFERSDFSDSIKIQTPELGEVFQNKDSDYLKNDNPEEHLKTSGLAGEPEGELSKEDHENTEKYMGTESQGSAAAEPEDDSFHWTPHTSVEPGHSDKREDLLIISSFFKEQQSLQRFQKYFNVHELEALLQEMSSKLKSAQQESLPYNMEKVLDKVFRASESQILSIAEKMLDTRVAENRDLGMNENNIFEEAAVLDDIQDLIYFVRYKHSTAEETATLVMAPPLEEGLGGAMEEMQPLHEDNFSREKTAELNVQVPEEPTHLDQRVIGDTHASEVSQKPNTEKDLDPGPVTTEDTPMDAIDANKQPETAAEEPASVTPLENAILLIYSFMFYLTKSLVATLPDDVQPGPDFYGLPWKPVFITAFLGIASFAIFLWRTVLVVKDRVYQVTEQQISEKLKTIMKENTELVQKLSNYEQKIKESKKHVQETRKQNMILSDEAIKYKDKIKTLEKNQEILDDTAKNLRVMLESEREQNVKNQDLISENKKSIEKLKDVISMNASEFSEVQIALNEAKLSEEKVKSECHRVQEENARLKKKKEQLQQEIEDWSKLHAELSEQIKSFEKSQKDLEVALTHKDDNINALTNCITQLNLLECESESEGQNKGGNDSDELANGEVGGDRNEKMKNQIKQMMDVSRTQTAISVVEEDLKLLQLKLRASVSTKCNLEDQVKKLEDDRNSLQAAKAGLEDECKTLRQKVEILNELYQQKEMALQKKLSQEEYERQEREHRLSAADEKAVSAAEEVKTYKRRIEEMEDELQKTERSFKNQIATHEKKAHENWLKARAAERAIAEEKREAANLRHKLLELTQKMAMLQEEPVIVKPMPGKPNTQNPPRRGPLSQNGSFGPSPVSGGECSPPLTVEPPVRPLSATLNRRDMPRSEFGSVDGPLPHPRWSAEASGKPSPSDPGSGTATMMNSSSRGSSPTRVLDEGKVNMAPKGPPPFPGVPLMSTPMGGPVPPPIRYGPPPQLCGPFGPRPLPPPFGPGMRPPLGLREFAPGVPPGRRDLPLHPRGFLPGHAPFRPLGSLGPREYFIPGTRLPPPTHGPQEYPPPPAVRDLLPSGSRDEPPPASQSTSQDCSQALKQSP

SEQ ID NO: 22 - DNA, 8126 bp, Homo sapiens
  source 1..8126: mol_type = genomic DNA; note = MIA3 Accession number: NM_198551
gaggtgaccacaacatggctgcggcgcctgggctgctcgtctggctgctcgtgctccggctgccctggcgggtgccgggccagctggaccccagcactggccggcggttctcggagcacaaactctgcgcggacgacgaatgcagcatgttaatgtaccgcggtgaggctcttgaagatttcacaggcccggattgtcgttttgtgaattttaaaaaaggtgatcctgtatatgtttactataaactggcaagaggatggcctgaagtttgggctggaagtgttggacgcacttttggatattttccaaaagatttaatccaggtagttcatgaatataccaaagaagagctacaagttccaacagatgagacggattttgtttgttttgatggaggaagagatgattttcataattataatgtagaagaacttttagggtttttggaactgtacaattctgcagctacagattctgagaaagctgtagaaaaaactttacaggatatggaaaaaaaccctgaattatctaaggaaagggaacctgaacctgaaccagtagaagccaactcagaggaaagtgatagtgtattctcagaaaacactgaggatcttcaggaacagtttacaactcagaagcaccactcccatgcaaacagccaagcaaatcatgctcagggagagcaggcttcatttgaatcttttgaagaaatgctgcaagataaactaaaagtgccagaaagtgaaaacaacaaaaccagcaatagttctcaggtctcaaatgaacaggataagattgatgcctataaacttttgaaaaaagaaatgactctagacttgaaaaccaaatttggctcaacagctgatgcacttgtatctgatgatgagacaaccagactcgttacttcattagaagatgattttgatgaggaattggatactgagtattatgcagttggaaaggaagatgaggagaaccaagaagactttgatgagttgccattacttacctttacagatggggaagatatgaaaactccagcaaagtctggcgttgagaaatatccaacagataaagagcagaattcaaatgaagaggacaaggttcagctaactgtgccccctggcatcaaaaatgatgataaaaatatactaacaacctggggggacactatcttctctattgtcacaggaggtgaagaaacaagagatacgatggatttagagagctctagttcagaggaagaaaaagaagatgatgatgatgcattagtcccagatagcaaacaggggaaaccacagtcagcaacagattatagtgaccctgacaatgtagatgatggtctttttattgtagacattcctaaaacaaataatgacaaagaagtaaacgcagaacatcacattaaaggaaaagggaggggagttcaggaatccaagaggggcctggtacaagataagacagaattagaggatgaaaatcaagaaggcatgactgtgcacagttctgttcacagcaataacctcaactctatgccagctgctgaaaagggtaaagacacattaaaatcagcttatgatgatacagaaaatgacctaaaaggagcagctattcatatctcaaaaggaatgctccacgaagaaaagcctggagagcagattttggaaggtggctcagagagtgaatctgcacagaaagctgcagggaatcaaatgaatgacagaaagattcaacaggaatccctgggtagtgcaccactcatgggagatgaccaccctaacgcatccagagacagtgtggagggagacgctttggtaaatggggccaaactgcacacgctttcagtggagcatcaacgtgaggaattgaaagaggaattagttcttaaaactcaaaaccaacctagattctcctctccagatgagattgatttgcccagagaactggaagacgaggttcccattctgggaagaaatcttccctggcaacaagaaagagatgtggctgccacagccagtaagcaaatgagtgagaagataaggctctctgagggagaagccaaagaggactccttggatgaagagttttttcatcacaaggcaatgcagggcacagaggtaggacagacagaccaaactgacagcacaggaggaccagctttcctttctaaagtagaagaggatgattatccctctgaagaactactagaggatgaaaacgctataaatgcaaaacggtctaaagaaaaaaaccctgggaatcagggcaggcagtttgatgttaatctgcaagtccctgacagagcagttttagggaccattcatccagatccagaaattgaagaaagcaagcaagaaactagtatgattttggatagcgaaaaaacaagtgagactgctgccaaaggggtcaacacaggaggcagggaaccaaatacaatggtggaaaaagaacgccctctggcagataagaaagcacagagaccatttgaacgaagtgacttttctgacagcataaaaattcagactccagaattaggtgaagtgtttcagaataaagattctgattatctgaagaacgacaaccctgaggaacatctgaagacctcagggcttgcaggggagcctgagggagaactctcaaaagaggaccatgagaacacagagaagtacatgggcacagaaagccaggggtctgctgctgcagaacctgaagatgactcgttccactggactccacatacaagtgtagagccagggcatagtgacaagagggaggacttacttatcataagcagcttctttaaagaacaacagtctttgcagcggttccagaagtactttaatgtccatgagctggaagccttgctacaagaaatgtcatcaaaactgaagtcagcgcagcaggagagcctgccctataatatggaaaaagtcctagataaggtcttccgtgcttctgagtcacaaattctgagcatagcagaaaaaatgcttgatactcgtgtggctgaaaatagagatctgggaatgaacgaaaataacatatttgaagaggctgcagtgcttgatgacattcaagacctcatctattttgtcaggtacaagcactccacagcagaggagacagccacactggtgatggcaccacctctagaggaaggcttgggtggagcaatggaagagatgcaaccactgcatgaagataatttctcacgagagaagacagcagaacttaatgtgcaggttcctgaagaacccacccacttggaccaacgtgtgattggggacactcatgcctcagaagtgtcacagaagccaaatactgagaaagacctggacccagggccagttacaacagaagacactcctatggatgctattgatgcaaacaagcaaccagagacagccgccgaagagccggcaagtgtcacacctttggaaaacgcaatccttctaatatattcattcatgttttatttaactaagtcgctagttgctacattgcctgatgatgttcagcctgggcctgatttttatggactgccatggaaacctgtatttatcactgccttcttgggaattgcttcgtttgccattttcttatggagaactgtccttgttgtgaaggatagagtatatcaagtcacggaacagcaaatttctgagaagttgaagactatcatgaaagaaaatacagaacttgtacaaaaattgtcaaattatgaacagaagatcaaggaatcaaagaaacatgttcaggaaaccaggaaacaaaatatgattctctctgatgaagcaattaaatataaggataaaatcaagacacttgaaaaaaatcaggaaattctggatgacacagctaaaaatcttcgtgttatgctagaatctgagagagaacagaatgtcaagaatcaggacttgatatcagaaaacaagaaatctatagagaagttaaaggatgttatttcaatgaatgcctcagaattttcagaggttcagattgcacttaatgaagctaagcttagtgaagagaaggtgaagtctgaatgccatcgggttcaagaagaaaatgctaggcttaagaagaaaaaagagcagttgcagcaggaaatcgaagactggagtaaattacatgctgagctcagtgagcaaatcaaatcatttgagaagtctcagaaagatttggaagtagctcttactcacaaggatgataatattaatgctttgactaactgcattacacagttgaatctgttagagtgtgaatctgaatctgagggtcaaaataaaggtggaaatgattcagatgaattagcaaatggagaagtgggaggtgaccggaatgagaagatgaaaaatcaaattaagcagatgatggatgtctctcggacacagactgcaatatcggtagttgaagaggatctaaagcttttacagcttaagctaagagcctccgtgtccactaaatgtaacctggaagaccaggtaaagaaattggaagatgaccgcaactcactacaagctgccaaagctggactggaagatgaatgcaaaaccttgaggcagaaagtggagattctgaatgagctctatcagcagaaggagatggctttgcaaaagaaactgagtcaagaagagtatgaacggcaagaaagagagcacaggctgtcagctgcagatgaaaaggcagtttcggctgcagaggaagtaaaaacttacaagcggagaattgaagaaatggaggatgaattacagaagacagagcggtcatttaaaaaccagatcgctacccatgagaagaaagctcatgaaaactggctcaaagctcgtgctgcagaaagagctatagctgaagagaaaagggaagctgccaatttgagacacaaattattagaattaacacaaaagatggcaatgctgcaagaagaacctgtgattgtaaaaccaatgccaggaaaaccaaatacacaaaaccctccacggagaggtcctctgagccagaatggctcttttggcccatcccctgtgagtggtggagaatgctcccctccattgacagtggagccacccgtgagacctctctctgctactctcaatcgaagagatatgcctagaagtgaatttggatcagtggacgggcctctacctcatcctcgatggtcagctgaggcatctgggaaaccctctccttctgatccaggatctggtacagctaccatgatgaacagcagctcaagaggctcttcccctaccagggtactcgatgaaggcaaggttaatatggctccaaaagggccccctcctttcccaggagtccctctcatgagcacccccatgggaggccctgtaccaccacccattcgatatggaccaccacctcagctctgcggaccttttgggcctcggccacttcctccaccctttggccctggtatgcgtccaccactaggcttaagagaatttgcaccaggcgttccaccaggaagacgggacctgcctctccaccctcggggatttttacctggacacgcaccatttagacctttaggttcacttggcccaagagagtactttattcctggtacccgattaccacccccaacccatggtccccaggaatacccaccaccacctgctgtaagagacttactgccgtcaggctctagagatgagcctccacctgcctctcagagcactagccaggactgttcacaggctttaaaacagagcccataaaactatgacctctgaggtttcattggaaagaaagtgtactgtgcattatccattacagtaaaggatttcattggcttcaaaatccaaaagtttattttaaaaggtttgttgttagaactaagctgccttggcagtgtgcatttttgagccaaacaattcaaaaatgtcatttcttccctaaataaaaatcaccttttaagctagagcgtccttacaactttgaaatgtgcaataaagaatacctgtgttttagctaatgtagcatatgtaattgcaaaatgatttagaatgtcatgaaaaatatgaacatttcctgtggaaatgctttaagaacatgtatttccattatcctatttttagtgtacaccagctgaatacggagcaatggtgtttataagcgtttttttaaactatctggtcacaaagactgttacgctaaaaatgtttactaaaagatcactaaactatctcccctcttgctgaagttctttgtagtaatagctcataaaaatttgtttattaatatttcccaagtgtctgttgactcattggactgttatgaggcttgtgccatttggggaacatgtaaactcaggctcccagaactgaagatggtggctggtggcacacttccggctgctcctccgtcacctgtgaactctacaagtgacgtctttttatttcaaagaagtttatttcccacttgtatagcattcacatgctttctttacgatcctcattgtctatttgagaatggttttctgagagtgagtttacattagtagcaagagttgtttgacctgatgttccattgtttttaccattcctgtagaaaaagggtgcacaacagaaaaatgaaaatgatgtgtcatggccataaaagtatagaaatctttaaaaattttaaaatgtacagtcccttatctatctttcccattccttgccactgatttttgaggaatataataaaaagattggaagagtataatgccatgagaaagaatgatttaggactgtgagggttataacatgccctaggtcagcaaccaagggttgaaatcagttctgttttagggggaaatgggggcgacagatattattccaaaattaatattaattaatatttaaacgttggtgtttttatttaaaaatcagtaactaaccatctggaattgcaccatacttaaagtcttatccattactacactgtctttaaaacaatgtttctttaaatactctacaacgtttctaagaacgaacttcagacattttaattacagtaataatagcactccttttaaggagtttcagatccacactaaaactaaaatcataaaaggctgatacttttgtttgctgctaggctatattcttccattctttgaagtcctatgatgtaatatttttgaaacctagtgtatgtcttgtcactgttgtgatatttaatcgattaagaataccttgtaaaaaggagcaaaagcttcaatgtgaaacaattttctctctttatactaaacaactgaagatagatagtttagaaagataaggacctttgaaagaagacaactctgtcaaagttcataaggaatataaaaattcttcaggaaaagagaattcaatctatatgtcctcccgtttaatatcaagaatagaagaaattaagaggaaaactccacagaagagcataggccacttttagccatgtaaaaataagattaagtcacaaatacaacttttgaatttacctgtcaatatctctttaggacacaaaacaatgctgaagttaatataatttctaattttaaatgtcatttaagtgtagattatgccatctaggaaggtaagtaggaaaggtaaattaaatctatttttaaaattcaaaatattagagtatttttcccctctaaagccttttttggtgattattctgtatctgacataattgagaaactggtaagctgtaaagattccagtgtagcttctctgagaagttgtgagccagtccataactgcttcctcacatccatctgattgcaccatttctgcagcaaaccccaaagcagggtgccaatatgcagatggcatagggagtatcatccctcagccaaatcacttttccatctctaaagtttcatctattttggaagtcatctccaactaattgtgtctggatttagttgctaaaattgtcttatttatgaagcagcaatattcagcctgaaagcatttctgccatagttgttgtagttatatcgccaatggctgatttttttcattggaaagtaaatttaagtaattcgtgggatgtggtatattctgtgtcaacttcaagataatcactcattttctcgttatattcaggtctgaattaaagttaagttaatcaca

SEQ ID NO: 23 - protein, 1445 aa, Homo sapiens
  source 1..1445: note = CD109 UNITPROT ID: Q6YHK3
MQGPPLLTAAHLLCVCTAALAVAPGPRFLVTAPGIIRPGGNVTIGVELLEHCPSQVTVKAELLKTASNLTVSVLEAEGVFEKGSFKTLTLPSLPLNSADEIYELRVTGRTQDEILFSNSTRLSFETKRISVFIQTDKALYKPKQEVKFRIVTLFSDFKPYKTSLNILIKDPKSNLIQQWLSQQSDLGVISKTFQLSSHPILGDWSIQVQVNDQTYYQSFQVSEYVLPKFEVTLQTPLYCSMNSKHLNGTITAKYTYGKPVKGDVTLTFLPLSFWGKKKNITKTFKINGSANFSFNDEEMKNVMDSSNGLSEYLDLSSPGPVEILTTVTESVTGISRNVSTNVFFKQHDYIIEFFDYTTVLKPSLNFTATVKVTRADGNQLTLEERRNNVVITVTQRNYTEYWSGSNSGNQKMEAVQKINYTVPQSGTFKIEFPILEDSSELQLKAYFLGSKSSMAVHSLFKSPSKTYIQLKTRDENIKVGSPFELVVSGNKRLKELSYMVVSRGQLVAVGKQNSTMFSLTPENSWTPKACVIVYYIEDDGEIISDVLKIPVQLVFKNKIKLYWSKVKAEPSEKVSLRISVTQPDSIVGIVAVDKSVNLMNASNDITMENVVHELELYNTGYYLGMFMNSFAVFQECGLWVLTDANLTKDYIDGVYDNAEYAERFMEENEGHIVDIHDFSLGSSPHVRKHFPETWIWLDTNMGYRIYQEFEVTVPDSITSWVATGFVISEDLGLGLTTTPVELQAFQPFFIFLNLPYSVIRGEEFALEITIFNYLKDATEVKVIIEKSDKFDILMTSNEINATGHQQTLLVPSEDGATVLFPIRPTHLGEIPITVTALSPTASDAVTQMILVKAEGIEKSYSQSILLDLTDNRLQSTLKTLSFSFPPNTVTGSERVQITAIGDVLGPSINGLASLIRMPYGCGEQNMINFAPNIYILDYLTKKKQLTDNLKEKALSFMRQGYQRELLYQREDGSFSAFGNYDPSGSTWLSAFVLRCFLEADPYIDIDQNVLHRTYTWLKGHQKSNGEFWDPGRVIHSELQGGNKSPVTLTAYIVTSLLGYRKYQPNIDVQESIHFLESEFSRGISDNYTLALITYALSSVGSPKAKEALNMLTWRAEQEGGMQFWVSSESKLSDSWQPRSLDIEVAAYALLSHFLQFQTSEGIPIMRWLSRQRNSLGGFASTQDTTVALKALSEFAALMNTERTNIQVTVTGPSSPSPVKFLIDTHNRLLLQTAELAVVQPTAVNISANGFGFAICQLNVVYNVKASGSSRRRRSIQNQEAFDLDVAVKENKDDLNHVDLNVCTSFSGPGRSGMALMEVNLLSGFMVPSEAISLSETVKKVEYDHGKLNLYLDSVNETQFCVNIPAVRNFKVSNTQDASVSIVDYYEPRRQAVRSYNSEVKLSSCDLCSDVQGCRPCEDGASGSHHHSSVIFIFCFKLLYFMELWL

SEQ ID NO: 24 - DNA, 9031 bp, Homo sapiens
  source 1..9031: mol_type = genomic DNA; note = CD109 Accession number: NM_133493
agacgccgtcgagatgcagggcccaccgctcctgaccgccgcccacctcctctgcgtgtgcaccgccgcgctggccgtggctcccgggcctcggtttctggtgacagccccagggatcatcaggcccggaggaaatgtgactattggggtggagcttctggaacactgcccttcacaggtgactgtgaaggcggagctgctcaagacagcatcaaacctcactgtctctgtcctggaagcagaaggagtctttgaaaaaggctcttttaagacacttactcttccatcactacctctgaacagtgcagatgagatttatgagctacgtgtaaccggacgtacccaggatgagattttattctctaatagtacccgcttatcatttgagaccaagagaatatctgtcttcattcaaacagacaaggccttatacaagccaaagcaagaagtgaagtttcgcattgttacactcttctcagattttaagccttacaaaacctctttaaacattctcattaaggaccccaaatcaaatttgatccaacagtggttgtcacaacaaagtgatcttggagtcatttccaaaacttttcagctatcttcccatccaatacttggtgactggtctattcaagttcaagtgaatgaccagacatactatcaatcatttcaggtttcagaatatgtattaccaaaatttgaagtgactttgcagacaccattatattgttctatgaattctaagcatttaaatggtaccatcacggcaaagtatacatatgggaagccagtgaaaggagacgtaacgcttacatttttacctttatccttttggggaaagaagaaaaatattacaaaaacatttaagataaatggatctgcaaacttctcttttaatgatgaagagatgaaaaatgtaatggattcttcaaatggactttctgaatacctggatctatcttcccctggaccagtagaaattttaaccacagtgacagaatcagttacaggtatttcaagaaatgtaagcactaatgtgttcttcaagcaacatgattacatcattgagttttttgattatactactgtcttgaagccatctctcaacttcacagccactgtgaaggtaactcgtgctgatggcaaccaactgactcttgaagaaagaagaaataatgtagtcataacagtgacacagagaaactatactgagtactggagcggatctaacagtggaaatcagaaaatggaagctgttcagaaaataaattatactgtcccccaaagtggaacttttaagattgaattcccaatcctggaggattccagtgagctacagttgaaggcctatttccttggtagtaaaagtagcatggcagttcatagtctgtttaagtctcctagtaagacatacatccaactaaaaacaagagatgaaaatataaaggtgggatcgccttttgagttggtggttagtggcaacaaacgattgaaggagttaagctatatggtagtatccaggggacagttggtggctgtaggaaaacaaaattcaacaatgttctctttaacaccagaaaattcttggactccaaaagcctgtgtaattgtgtattatattgaagatgatggggaaattataagtgatgttctaaaaattcctgttcagcttgtttttaaaaataagataaagctatattggagtaaagtgaaagctgaaccatctgagaaagtctctcttaggatctctgtgacacagcctgactccatagttgggattgtagctgttgacaaaagtgtgaatctgatgaatgcctctaatgatattacaatggaaaatgtggtccatgagttggaactttataacacaggatattatttaggcatgttcatgaattcttttgcagtctttcaggaatgtggactctgggtattgacagatgcaaacctcacgaaggattatattgatggtgtttatgacaatgcagaatatgctgagaggtttatggaggaaaatgaaggacatattgtagatattcatgacttttctttgggtagcagtccacatgtccgaaagcattttccagagacttggatttggctagacaccaacatgggttacaggatttaccaagaatttgaagtaactgtacctgattctatcacttcttgggtggctactggttttgtgatctctgaggacctgggtcttggactaacaactactccagtggagctccaagccttccaaccatttttcatttttttgaatcttccctactctgttatcagaggtgaagaatttgctttggaaataactatattcaattatttgaaagatgccactgaggttaaggtaatcattgagaaaagtgacaaatttgatattctaatgacttcaaatgaaataaatgccacaggccaccagcagacccttctggttcccagtgaggatggggcaactgttctttttcccatcaggccaacacatctgggagaaattcctatcacagtcacagctctttcacccactgcttctgatgctgtcacccagatgattttagtaaaggctgaaggaatagaaaaatcatattcacaatccatcttattagacttgactgacaataggctacagagtaccctgaaaactttgagtttctcatttcctcctaatacagtgactggcagtgaaagagttcagatcactgcaattggagatgttcttggtccttccatcaatggcttagcctcattgattcggatgccttatggctgtggtgaacagaacatgataaattttgctccaaatatttacattttggattatctgactaaaaagaaacaactgacagataatttgaaagaaaaagctctttcatttatgaggcaaggttaccagagagaacttctctatcagagggaagatggctctttcagtgcttttgggaattatgacccttctgggagcacttggttgtcagcttttgttttaagatgtttccttgaagccgatccttacatagatattgatcagaatgtgttacacagaacatacacttggcttaaaggacatcagaaatccaacggtgaattttgggatccaggaagagtgattcatagtgagcttcaaggtggcaataaaagtccagtaacacttacagcctatattgtaacttctctcctgggatatagaaagtatcagcctaacattgatgtgcaagagtctatccattttttggagtctgaattcagtagaggaatttcagacaattatactctagcccttataacttatgcattgtcatcagtggggagtcctaaagcgaaggaagctttgaatatgctgacttggagagcagaacaagaaggtggcatgcaattctgggtgtcatcagagtccaaactttctgactcctggcagccacgctccctggatattgaagttgcagcctatgcactgctctcacacttcttacaatttcagacttctgagggaatcccaattatgaggtggctaagcaggcaaagaaatagcttgggtggttttgcatctactcaggataccactgtggctttaaaggctctgtctgaatttgcagccctaatgaatacagaaaggacaaatatccaagtgaccgtgacggggcctagctcaccaagtcctgtaaagtttctgattgacacacacaaccgcttactccttcagacagcagagcttgctgtggtacagccaacggcagttaatatttccgcaaatggttttggatttgctatttgtcagctcaatgttgtatataatgtgaaggcttctgggtcttctagaagacgaagatctatccaaaatcaagaagcctttgatttagatgttgctgtaaaagaaaataaagatgatctcaatcatgtggatttgaatgtgtgtacaagcttttcgggcccgggtaggagtggcatggctcttatggaagttaacctattaagtggctttatggtgccttcagaagcaatttctctgagcgagacagtgaagaaagtggaatatgatcatggaaaactcaacctctatttagattctgtaaatgaaacccagttttgtgttaatattcctgctgtgagaaactttaaagtttcaaatacccaagatgcttcagtgtccatagtggattactatgagccaaggagacaggcggtgagaagttacaactctgaagtgaagctgtcctcctgtgacctttgcagtgatgtccagggctgccgtccttgtgaggatggagcttcaggctcccatcatcactcttcagtcatttttattttctgtttcaagcttctgtactttatggaactttggctgtgatttatttttaaaggactctgtgtaacactaacatttccagtagtcacatgtgattgttttgttttcgtagaagaatactgcttctattttgaaaaaagagttttttttctttctatggggttgcagggatggtgtacaacaggtcctagcatgtatagctgcatagatttcttcacctgatctttgtgtggaagatcagaatgaatgcagttgtgtgtctatattttcccctctcaaaatcttttagaatttttttggaggtgtttgttttctccagaataaaggtattactttagaataggtattctcctcattttgtgaaagaaatgaacctagattcttaagcattattacacatccatgtttgcttaaagatggatttccctgggaatgggagaaaacagccagcaggaggagcttcatctgttcccttcccacctccaacctagccctactgcccaccccaccccaacccaccccatgcccagtggtctcagtagatacttcttaactggaaattctttcttttcagaatctaggtggtgaattttttttaagtggcacggtctttttctgcttgaaatctgatcacaccccccagccattgccctccctctctttttcctctgtagagaaatgtgaggggcagtacatttactgtgcttttcacaccatctcagaggttgaggagcatactgaaaattgccctggggggtgctgggtgtgctgtctccttcccacatcctcagccccacaccagctctatttcaggggtgagagtcagagagcactgcaatatgtgcttcatgggatttcgattcgaagatcctagaccagggagacactgtgagccagggatacaacaaaatactaggtaagtcactgcagaccgacctccctgcagtttgggaaagaagctgggtttgtggagaatcagagcatcttgacatgactgctgacctaaagatccctggcattggccagggatcctgtggaacctcttctagttcaggggtgtgagcattagactgccagttgtctagtgacatctgatgcttgctgtgaacttttaagatccccgaatcctgagcacctcaatctttaattgccctgtattccgaagggtaatataatttatctggatggaaattttaaagatgaatcccccttttttcttttcttctctcttttctttccttctccctttcttctttgccttctaaatatactgaaatgatttagatatgtgtcaacaattaatgatcttttattcaatctaagaaatggtttagtttttctctttagctctatggcatttcactcaagtggacaggggaaaaagtaattgccatgggctccaaagaatttgctttatgtttttagctatttaaaaataaatccatcaaaaataaagtatgcaaatgtatcttttaaagttaatttttaaaaatgctcttattttagtgaattttcagaaattatagtggaatggatgctcatatattgcttatggatattttggataccaaagtaggaataactgacattcagtattttaaagctggcaaacctgtacatagaaaatagatccccagacagtggtctatgaagagggcagttaagtatcaaatacttaattttcttgcctttttttcttaagtggggaaaagtttctagatctcttacacctctgacacaatctgttctaaaacaggcacttgtaatgttggggcctccttgtaaacgtgtttttgccctttactctctgggagttctttaaaggtgaaatcatcttacaaagaaattgggggagggtcttggcaaaggactttcccctcctctttcctggcctgggaaccttatactgacaatcaatactttatattttaaagtatataatttatagttaacttctagtgtaatatattaggaaacactagaatggaaaggccattggaagacaggttgtatcttttttagaccatatttccttgtttaaaaactatcatttgaatacttttttggtgaagaactccatgttttcaagttaaaggtcacctcgtaggccaggcgcagtggctcatgcctgtaatcccagcactctgggaggctgaggcgggtgaatcacaaggttaggagtttgagaccagcctggccaatatggtgaaaccccgtccctactaaaaatacaaaatttagccaggcgtggtggcatgcacctgtagtcccacctactcgggaggctgaggcaggagaatcacttgaacctgagagacagaggttgcagtgagccgagatcacgccactgcactccagcctgggggacagagtgagattctgtctcaaaaaacaaaaaacaaaaaagtcaccttgtaactcatctctttttattgtaagtttattaaaaatgaagaggacaacaatgagaaggaacataaagggttagctagcactgtctcctggtgcatggggctgtgcagatgtcccggccacttcttccttcatacttcccttagagaacttgctctgctacaagcagtgggcttggactaaaagtgattaaaataccacaggcataaggagaaaaggagtatatgtagtagtaataattactagtataaattattttcttcacatgctatgagtaataatattaaaaaactcattttaccattaagattccttatgctgaagctcttccatttagaatactgtcaatgtcatttactggtatgaactaaagtcccccttcttttccactcactgggaaccttagtaaaacaccagcatatcttacctctctttctgactggccgatgcttccagagactgaatgttgggaaaacctagtagccaaacaattctaggacagaataacatttttatatttggttccaccatcttattacatttagttatagttttaaaaaagaaattcaagcccattaaaatatgtctggtcaatgaaatgcttccttttattgtgttgtgctattgtactttgtttttcaaaacattgtaaaaatagtatctttggtttagtattttggattatatattataatctgaggagtgttttgcttatgtagaatccagatatatttctgttacctaggagatgttacttacatatgtaatactgtatcctgcacgtggaaatattcagaattgtagatagcataactctccctgctcctattcttttgagcctaggtataattttttttttttttttagaaaaagacatatttagctttaatttctatttatgctaaacatatttataagtagtctgtcaatataataccaactatttttatttttacataattcaattatttcatttgacatgtctggcagactcaagacattaagtaaaaaattggaactatgatttttctttgtcattttttaaaaaagaattattttattaacctgctggcatataatctggagttcttttcacaaccttactttttctgatttgctttattgaatgattgaatactcatttctttctaaaaatatgttgtaaattctcccttggcaagatttctccctatgagggtagttattatttgagtctgccaagtggttaccatggggcaaggtgccatgatgtattcttgggtgcattggttttttgcgcattgtaaatttaagacacttatagtaagtggactcattcatagatgagtttcagaaccttttacgttctcggtagaggcttctgtcggacaggcagaagagtgtattcctcacttttttttttgtcttcaaattccagtaaggcatagcacttttaagaaattagaatttttctatcatctatgcaaatgatatttatgttaatattaaatatcttatgttacactgggagtaatttgaggtgcaattatttttattactactttgaatagaggaccattatccttctttcttcagaaaactaagaagtaagtgtaacttttaaagtaagtatatatcagtgagagtaggcttgttttacaactatttctagccagtgagttgtgttttcatgtctcatcaaaagacaataccacattgcatcattttacaaaatatgttgtcattttcatttcagttgtaacataggaaaatagatatttcctagatgatttctgagtttcttactgcaaagaacagttataaattggtatacatgtgtctctgtaatagggataatattgatatatctgttgctacatatttaagaatcattctatcttatgttgtcttgaggccaagatttaccacgtttgcccagtgtattgaattggtggtagaaggtagttccatgttccatttgtagatctttaagattttatctttgataactttaatagaatgtggctcagttctggtccttcaagcctgtatggtttggattttcagtaggggacagttgatgtggagtcaatctctttggtacacaggaagctttataaaatttcattcacgaatctcttattttgggaagctgttttgcatatgagaagaacactgttgaaataaggaactaaagctttatatattgatcaaggtgattctgaaagttttaatttttaatgttgtaatgttatgttattgttaattgtactttattatgtattcaatagaaaatcatgatttattaataaaagcttaaattctcatcta

SEQ ID NO: 25 - protein, 623 aa, Homo sapiens
  source 1..623: note = IRGQ UNITPROT ID: Q8WZA9
MPPPQGDVTALFLGPPGLGKSALIAALCDKDVETLEAPEGRPDSGVPSLRAAGPGLFLGELSCPPAAPGPWAAEANVLVLVLPGPEGNGEPLAPALGEAALAALARGTPLLAVRNLRPGDSQTAAQARDQTAALLNSAGLGAADLFVLPANCGSSDGCEELERLRAALQSQAEALRRLLPPAQDGFEVLGAAELEAVREAFETGGLEAALSWVRSGLERLGSARLDLAVAGKADVGLVVDMLLGLDPGDPGAAPASVPTAPTPFPAPERPNVVLWTVPLGHTGTATTAAAASHPTHYDALILVTPGAPTEKDWAQVQALLLPDAPLVCVRTDGEGEDPECLGEGKMENPKGESLKNAGGGGLENALSKGREKCSAGSQKAGSGEGPGKAGSEGLQQVVGMKKSGGGDSERAAALSPEDETWEVLEEAPPPVFPLRPGGLPGLCEWLRRALPPAQAGALLLALPPASPSAARTKAAALRAGAWRPALLASLAAAAAPLPGLGWACDVALLRGQLAEWRRGLGLEPTALARRERALGLASGELAARAHFPGPVTRAEVEARLGAWAGEGTAGGAALGALSFLWPAGGAAATGGLGYRAAHGVLLQALDEMRADAEAVLAPPEPAQ

SEQ ID NO: 26 - DNA, 9686 bp, Homo sapiens
  source 1..9686: mol_type = genomic DNA; note = IRGQ Accession number: NM_001007561
aggttaaagctaccgggacgggtcccggcatctctaaatcaccgctccctggcctcttcggcctccgtccgccgcggcccaggggccgggcttctcagctgctgacctactgccaccgactgcgctctctcccgtgggtcggctttttgctcgccatgcctccgccgcagggtgacgtgaccgccttgttcctggggcctccgggcttggggaagtccgcgctgatcgcagcgctgtgcgacaaggatgtggagacgctcgaggcccccgagggacggccggactccggggttcccagcctaagagctgcgggcccaggcctttttctgggcgagctgagctgcccacccgcagcgccggggccctgggcggcggaagccaacgtgctggtactggtgctgcccggacccgaggggaacggggaaccgttggctccagccctgggagaggcagcgctggccgccctggcccgagggaccccgctactggctgtgcggaacctccgtcctggggattcacagactgccgcccaggcccgtgatcagacagcagctctgctgaacagcgcggggttaggagctgcggatctgtttgtgctaccggcgaactgcggcagcagcgacggctgcgaggagctagagcgcctccgggcggcgctgcagagccaggcagaagcgctgcggaggctcctgccaccggcgcaggatggcttcgaggtgttgggtgcagcagagctagaggctgtgcgtgaggcctttgagaccggcggccttgaggctgcgctgtcgtgggtgcgctcaggcctggagcgcctgggcagcgcacggctagacctggccgtggctggcaaggctgacgtgggccttgtggtggacatgctgcttggattggatcctggcgacccaggcgctgcgcctgcttcggtccccacagcacccactcccttcccagccccagagcgcccgaatgtggtgctctggaccgtgcctctgggccacacgggcactgccaccaccgcggccgccgcctctcacccaacgcactacgacgccctcatcctcgtcacccctggggcccccactgagaaggactgggcccaggtccaggccttgctgctaccagatgcgcctcttgtctgcgtgcgcacagacggcgagggcgaggatccggagtgtctgggagaaggcaagatggagaatcccaagggcgagagcttaaagaacgcaggtggagggggattggagaatgcactcagtaagggaagggagaaatgtagcgctggatcgcagaaagcaggcagcggggaaggtcctgggaaagctggcagcgagggtttgcagcaggttgtcggcatgaagaaatcaggtggtggcgactcagagcgggccgctgcgttaagcccggaggacgagacgtgggaggtgctggaggaggcgccgccgccagtgttccccctacggcctggcggactcccagggctatgcgaatggctgcggcgagcgctccccccagcccaggcaggggcactgctgctggcgttgccaccagcatctcccagcgctgcccgaaccaaggctgcggcgttgcgagccggggcgtggaggccagctctgctggctagtctggcggcggcggcggcaccactcccagggctgggctgggcatgcgacgtggcacttctgcggggtcagctggcggagtggcgacggggcctggggctggaacccacggcactggctcgacgtgagcgtgccctgggcctggcttctggagagctggcagcgcgcgctcatttcccaggcccggtgacgcgcgccgaggtggaagcaagactgggcgcctgggcgggcgagggcactgctgggggcgcagcactgggggctctctccttcctgtggcctgcgggtggtgcagcggcgacaggtggcctgggctaccgagcggctcacggcgtcctgctgcaggctctcgatgagatgcgggctgatgctgaggctgtgctggcaccccctgagcctgcccagtgaggagtgggagggggcttgggagtccagactctgacaggggatgcctgggcttaatcctgggtgcttgaaggggatgtggactcttgacttccagctgggatgtgtgacttcttatcacctggattcagagagtctgggggacaggaatcctgatttttttttttttttttcttttttttgtgagacgaagtctcttgttgcccaggctggagtgcaatggcgcgacctcggctcactgcaacctccgcctcccgggttcaagcgattctcctgcctcagcgtccggagtagctgggattacaggtgcctgccaccacacctggctaatttttgtatttttagtagagacggggtttcaccatgttggccaggctggcctcgaactcctgacctcaggcgatcgacccgctccggcctcccaaagtgctaggattacaggcgtgagccaccgcccctggccaggaatcctgatacctttgggaaccatggtgaatgacatctagacccttctgtcctgaagggagttggtggcccagactctagcagggactatgtctttgtctcctagggagtagaaactggagttactggatgtttagtcctccagggaggctggtagaagtcctgtttcctaattggtggggaggtgtccatgactgggacctgaactccagtataggggagggagacctgagcgccccagggagctggaactcttgggcttcagagcctcagagggaaacagggtctacatttctctgggagaaaaagcctgcacacaggtccccaaggagcagtgggctttgaatcttgatggggtggcggaggcccctggggtctgagacttccggggttctaagatggctgtggaccttggttcctaaatattgggtaaggggaggtctgcatctggaggagggatcgggggcttgtgcgagaaagctggagacttcttgatctctcctggggagtggatgggtttctataattgccctccaaaagcatgtagggagggtggtcccacaaaaatgaggtgaggtgggtaagaggtctgggcatggtgggctctgggagtagccagggaccaggaatgaggtcttttgggtgtggaagggcagtaaagcatacctcagagacagctcctccaaaccttgtattgggatcccggcaactgcctctgtgagtgtgactgggaagggatatgactgccttcatcttctaggtgctgagcaattcaggtgatctctggggagtctgtttctctgtctcttttctttaggagtttctatctttttttggcctttttctcctggtatttaaccataaccctttatggccttggtgttttgtgcaccttccttttcagaagagcagctgtactgctgcactggtccaaacacttctgtatggacacctcgggtatccccaagaggctctgctttctgatgtacatagagggtgctgcattgagccaggggcccaccaaatgggtggtcaggcacttgagaccatgggaatatgccaggagtgaatgaagcaaaggcagaaaccacagtgcctggaatgttctaggctgctagccacatgtgggggaaaagttgcaggttacagaattcttcagtgtcaaaaacagaaaaggaggatctgagaatccaagcgatagaatcccttttgtcgtagacagaaagagcaaagtccagagagggcaggcttgaggcccaacagcacacagtaaggccctgtgggtctggcccttgcctattctcattcactgccccttcccactcctgtccagcctgatagactttccttctttttttttttgaaatggagtctcaccttgtcacccagtctggagtacagggatgtgatgactgtagctgagatgacaggcatgtgccaccacacctggctaatttttgtagtttagtagagaagggatttcaccctgttggtcaggctggtctcgaactcctgacctcaggtgatccacccgactcagactcccaaagtgctgggattacaggtgtgagccatcatggccgcctgactctttctgatgcctgagtggctaccttgagtcctgcctggggacccatgcacctgctgttctctttccttcaaggctctactcacaacttcctgttctactctcaaaccttcctgtgacgggctcagtcagatctcagctcacgtatcccctcagagaggacttcccctccctgaccaccctatctgaagtagctcacattcccccactattcatttcggccagttgagtttccttgtagcaattattactgtcaaaaatgatcttatttatttacctgtttattggcttttgacccgttgcctgtcctgttctctgttgtttccccagcatctagaacaataggtgcctgacacaataggtgcttcgtaaatatttattattattattattattttagagacagggtcttgctctgttgccccggctggaatacagtgggatgatcatggctcactgccatctccaactcctgggctcaaacgatcctcccacctccgcctacagagtagctgggactataggtacacagcaccaaattttctgtagagacgggggtcttgctttgtagcccacactagtgttgaactcctggcctcaagtgatcctcctgccttgatgggattacaggtgtgagccaccacacccagcctaaatgtttatttcattggtcagtgtcagaactaggattggaatttagattgttaatctcttgccacaagataggaaaatggagcaagatgaggagaaaaaagcatttaatgggagagaacacccttgtctgaggtcagggacctgggaagcaagcacgactttgccactgtcactgtgtgttacttggacagtgccttattttcccatctgtgaaataaaagagctggataagaaccttagttttgagatcctgtctcccttaaaagctgaagacaaaggtaactgatccaagggcagacaagggatggtaccatcatctccagcttggactcccactgctgacaaaatttgtcccttcaaagttgagatagctaccatggggaagagcacttagttctatactgaatggctccaggcattttcatgaaagctctttcagctttggggaagaatattcatccatatctttaccccatcatattagtgtctaagccctgcaatcaggcatgtcagccacgtgatggaatgggagggctgcagggcagcactgtccagtagaaacgaaatgcaagccacatatgtcattttaagttttctttttttgagatggagtttcactccatcacccaggctggagtgcagtggcacgatctcgcctcactgcaacctccgcctcccaggttcatgtgattctcctgcctcagcctcctgagtagctgggattacaggcatatgccaccatgcctggctaatttttgtatttttagtagagatggggtttcaccatgttgatcaggctggtctggaactactgacctcaggccacccgccttggcctcccaaagtgctgggattacaggcatgagccaccgcgcccagctaatttttgtatttttattttatttatttatttattttttgggagacggagtcttgctctgtcacccaggctggagtgcagttgtgcgatcttggctcactgcaacctcagcctcccaagtagctgggattacaggcatgcaccatcatgcccagctaatttttgtatttttagtagagatggggtttcactgtgttggccaggctggtcttgaactcctgacctcaggtgatccaccggcctcagcctcccaaagtgctgggattataggcgtgagccactgcacccgtcctaatttttgtatttttagtagagatggggtttcaccatgttggctaagctggtctggaactcatggcctcaagttatctgcccacctcagcctcccaaagtgctgagtaagccaagttttctaatagccacattagacaagtaaaaggaaacaggttaaattcattttaacatgttttacttaacccaatgtatccaaaatagcatttcaacatgtcatcggttttttagttttttttttttttgagatagtgcttcgctttgttgcccaggctggagtgcagtggcacaatctcggctcactgcaacctccaccttccaggttcaagtgattctcctgcctcagcctcccgagtagctgggattacaggcacccgccaccatgcccactaatttttgtatttttggttagagatggggtttcgccatgttggccaggctagtctcaaactcctgacctcaggtgatccacccacctcggcctcccaaagtgctaggattacaggcgtgaggcaccgtgcctggcgtcatcggtattatttaaatgaattatgttacgttcttttgtgctgtcttcaaaatctgttatatattttacacttacaccaaatctcaattaccatggtacatttttatctgaaatgcttgacctttattttgatttcataaaattcatagttggagaagtagattcacatatccaagttgttccaattatataatagttttccaaaaactgagatgggtgtccattttttttttaagtaaagatgcaggtctggttatgttgaccaagttgctgggttgttttgttttgttttgagacagagtctcactttgtcacccaggctggagtgcagtggcatgacctcagctcactgcaacctctgcctcccaggttcaactgattctcttgcatcatcctcctgagtagctgggactacaggtgtatgccaccatgcctggctaattttggtatttttctcagagacggggtttcaccatgttgggcatgctggtcttgaactgctgacctcaggtgatccgcccacctcggcctcccaaagtgctggtattacaggcatgggccaccacacctggcctcagctgttcaattaaaagtaaatacaacttaaaattctatgtttcattggcagtagtgcaacattaatactgagtagccacatgtgattagtggctatggtattggacagggaaggtacagaatacttccatcaacatagaaaattctatcagtctagctctaggggcagatagtccttccactgacttgggcaagtcactctacaaatggcatctacctcacatggttatggtgagaattcagcgtatgtatgtacatgcaggcacacaatatgcacacagacacataacatagtacaccctttcctgaaaagcctgacacatggagctcaaacatgagtgccacccacccctgggcagcaccaagatggctctagtctgggtgcctttgtctcacccccatgcctttgctcggagtgtgctcctcatttttctgccactttgaccctgtctctgatttggtcctgtctgacatcactgctatatgctttgctcctctcaatttcctctgccctcatgccagcaggagtcatgccagagatcatatctgagaaagcaagacaattttgtgtgtgtgtctgtgcccatagaggagtgctggttgtgttgatatagttgtagattggttgtgtttacacagttgtatatattgacacccttgagtgttatgacttcttttgggggtggtcgccttttaaatcataacttttaatgggattccattttagtctttgtgaagacataaggttgttggcaggcatctgtccctgggagcatccaagcagaaaagactaagactcccttgtagacagatcactggccgccactgaagtgtgtctgcatggcaccacagggctggaagacccttgaaggcaggaattcaaggaaatgtatgatgaattttggcattgccatcaaaagcagaacaggcatggaaaacttgggtgagtgggcgagacaacctcctcaccacagcagagttccatccatgcctggataatgatggagggatttgtgtccactgcagtggggaaccatgaaggacacatcaagggtgtggttggcctgtggtgctctttggaggaatgaataaaaatgaatagaaatcctattgcgtgtctgttcttttggagtttgagggaaaagaaagatccttgagattttgactgggctggaaacctagactccagcgtctggggataggagggatggtggggaatccgctgggaaaaactgggctgtgatcaagagaatttatcagtatctgagtttttccaccctggaaggagtgcgggcagacttactgtttaaacattgggagcttatgatggtaaagcgccttagttctggagccaggtatacccattaatgaccccaactgggccagcctttctgtagccatgcccttggattgttgctctccttctaggtttgactatgtggtttgcttcagccactagaacaatagcaaacatgatacaagcagaggcttggaaagtgcttatgcggccgggtgtggtggctcacacctataatcccagcactttgggaggccagggcgggcagatcacaaggtcaggagatcgagaccatcctggctaacacagtgaaaccccgtctctctactaaaaatacaaaaaattagctgggtgtggtggtgcacacctgtagtcccagctactcgggaggctgaggcaggagaatagcttgaacctgggaggcggaggttgtagtgagctgagactgcgccgctgcactccagcctgggcaacagagcgagacttctctcaaaaaaaaaaaaccaaagtgcttatgcactgggacttcctctcttgctccccttgggacccctaccaccactgccacatccaaaccccgggctggctgagcatggtggcatatgggtataaacccataatcccagcacttagggaggcaaaggtggaagaatttcatgagcccaggagatcgagactagcctgagcaacatggcaagacccccatctctacaaaaaagcaacaacaacagaattagccagatgtggtggtgtgcacctgtggtcccaactacatgggggaggctgaggcaagtggattgtttgagcccaggaagtcgaggctgaagtgagctatgatggctccactgcactccagcctgggtgacagagcaagacaatgtctaaaaaaataaaaagaaggaaagaaaaggaaaagatctgggctaacctgctgggtaataaagggaaaagagacacatggctccgtcatccttgatccctgccacccatagccaaccaacctctgaaacagagctccctagctgataggcagctgaacccagctgagaccagcaaaagaactgcccagctgatcccagaccaagttgcaacccagagaatcattaactaaataggtgattgttctaaaccactaaattttggagtggtttgttatgtagcaaaagcaactaatacagacttgttctctctgtgtgtgatgtggtctctttctccccaacaacatgacccaatgattaaaatcttaaattctgccactttttagctgtgtgactgccaatgtgacagccttctgagcctctgatgtctcctgaaaacagagatgtgaataatagtgcctatgacatagagttgtgaaaataaaatgaaaaacagcttcttaa

SEQ ID NO: 27 - protein, 298 aa, Homo sapiens
  source 1..298: note = GOLPH3 UNITPROT ID: Q9H4A6
MTSLTQRSSGLVQRRTEASRNAADKERAAGGGAGSSEDDAQSRRDEQDDDDKGDSKETRLTLMEEVLLLGLKDREGYTSFWNDCISSGLRGCMLIELALRGRLQLEACGMRRKSLLTRKVICKSDAPTGDVLLDEALKHVKETQPPETVQNWIELLSGETWNPLKLHYQLRNVRERLAKNLVEKGVLTTEKQNFLLFDMTTHPLTNNNIKQRLIKKVQEAVLDKWVNDPHRMDRRLLALIYLAHASDVLENAFAPLLDEQYDLATKRVRQLLDLDPEVECLKANTNEVLWAVVAAFTK

SEQ ID NO: 28 - DNA, 2678 bp, Homo sapiens
  source 1..2678: mol_type = genomic DNA; note = GOLPH3 Accession number: NM_022130
atattggaaaggcgccgccgccgcctccgccttggagctcggggtgtttcggggactgcggccacaggcaggaaggcgctcctctcctgccccgccgacgcccggccagcccgcttcgccctgacctgtttcctcatgactgcccccggccctgctgccgacggacgtcgccccggcgtccggatttaacacggaaacccggatcggaggccgcgcggggaggaggagggcgacccggtcggtcctgcgaccctctcggcccggctcggcgcctcggcgggagccatgacctcgctgacccagcgcagctccggcctggtgcagcggcgcaccgaggcctcccgcaacgccgccgacaaggagcgggcggcgggcggcggcgccggcagcagcgaggacgacgcgcagagccgccgcgacgagcaggacgacgacgacaagggcgactccaaggaaacgcggctgaccctgatggaggaagtgctcctgctgggcctcaaggaccgcgagggttacacatcattttggaatgactgtatatcatctggattacgtggctgtatgttaattgaattagcattgagaggaaggttacaactagaggcttgtggaatgagacgtaaaagtctattaacaagaaaggtaatctgtaagtcagatgctccaacaggggatgttcttcttgatgaagctctgaagcatgttaaggaaactcagcctccagaaacggtccagaactggattgaattacttagtggtgagacatggaatccattaaaattgcattatcagttaagaaatgtacgggaacgattagctaaaaacctggtggaaaagggtgtattgacaacagagaaacagaacttcctactttttgacatgacaacacatcccctcaccaataacaacattaagcagcgcctcatcaagaaagtacaggaagccgttcttgacaaatgggtgaatgaccctcaccgcatggacaggcgcttgctggccctcatttacctggctcatgcctcggacgtcctggagaatgcttttgctcctcttctggacgagcagtatgatttggctaccaagagagtgcggcagcttctcgacttagaccctgaagtggaatgtctgaaggccaacaccaatgaggttctgtgggcggtggtggcggcgttcaccaagtaactctgctcggggtgaaccattctcctttctctcaagtaaaccagtagtttttcttctgttgacttctggttttctgtaatttgtactttcccacactataattggcttctgttttacaaaatggtgggtggctttttcttttttgtacgtgtacaggattctgctggtacgagaggccttcctctttctgtttttaaaaaaagttttactgccatattggcattccattccctgttgccatcctcactgttacctgttttgggtttctggtctactttgactttcaaagtacctccagcctcctcatacgcacagcttttggatgacctcagcttgagtttctccatatgtgcatgtacatctagcattctgcctacagttcagacagaagtcacaaaaaggccttcaactcaccaaaggtaaatatctgtatctattaggacattttttacatagacttcagttgagatgtatacttagcaaaattatttttaaattgaaacagcacagtaaatacttaatataaaatgtcccttggattttgcttcccatgtaaatctattgtattattacacttgttataattttaactataaaggtccaattgtttcacagagccagtttgggatgggctgcattccatttatgctgtatatagtttgaattatatataaattaccccttcttctggccacccctgctcccatcttagtattttgcaagatctaatcagttgtacacctggtgcccctcgcttgcttcaatcatggttatttgatggcaaaatcgacctcttgtcgctgaaggagagagaaaagatgtgtgtctgattggtcctgggattttttgagctgtgccatttatggtactctttgcctatgcatccccttgttagattttttttaaattttatcttactgtttttataatttctattgggaagaggcttgtgaccagtaccaatcttgagtttctttttctgtccacaagtaaattaatatctgctctgaaatgtcatttatctactcacacattcttggggaaaaaaatcaaatgtcagtcctagcagatgttgcatgtaaattggtagcaagtaatgattacaacccagaggattaagaattttgtaacagaaagctctatgttttaattttttatatacaattaggataattagcattgtcagactataaacctttgctttttaaagtttatttttactatttctttatcactttattgtatcatcaccattggtttcataatgtaaatactatatgttgaacaaattaaatgtcaaaattttttattaccatagtccatgttaatagtggggctttcaggtgtttagagattttttttgttgttgttaacattcattgcaaaagtactagatggtgtataactctagagttgaattttaagggattccctaatatgtatactatctttttatctgaagtaataaataaacaatgatcttgaaagtgcctgaa

SEQ ID NO: 29 - DNA, 126033 bp, Homo sapiens
  source 1..126033: mol_type = genomic DNA; note = HGNC Approved Gene Symbol: BRCA1; note = Cytogenetic location: 17q21.31; note = Genomic coordinates (GRCh38): 17:43,044,295-43,170,327
tggaagtgtttgctaccaagtttatttgcagtgttaacagcacaacatttacaaaacgtattttgtacaatcaagtcttcactgcccttgcacactgggggggctagggaagacctagtccttccaacagctataaacagtcctggataatgggtttatgaaaaacactttttcttccttcagcaagcaaaattatttatgaagctgtatggtttcagcaacagggagcaaaggaaaaaaatcacctcaaagaaagcaacagcttccttcctggtgggatctgtcattttatagatatgaaatattcatgccagaggtcttatattttaagaggaatggattatataccagagctacaacaataaacattttacttattactaatgaggaattagaagactgtctttggaaaccggttcttgaaaatcttctgctgttttagaacacattctttagaaatctagcaaatatatctcagacttttagaaatctcttctagtttcattttcctttttttttttttttttttgagccacagtctcactgtcacccaggctggagtgccgtggtatgatcttggctcactgcaacctccacctcccgggctgaagtgattctcctgccttagccacctgagtagctgggattacaggtgtccaccaccatgaccggctaatttctgtatttttagtagagatggggtttcaccatgttggccaggctggtttcgaactcctgacctccagtgatctgcccaccttggcctcccaaagtgctgggattacaggcgtgagccaccatgcccaggtttcaagtttccttttcatttctaatacctgcctcagaatttcctccccaatgttccactccaacatttgagaactgcccaaggactattctgactttaagtcacataatcgatcccaagcactctccttccattgaagggtctgactctctgcctttgtgaacacagggttttagagaagtaaacttagggaaaccagctattctcttgaggccaagccactctgtgcttccagccctaagccaacaacagcctgaatagaaagaatagggctgataaataatgaatcagcatcttgctcaattggtggcgtttaaatggttttaaaatcttctcaggtgaaaaattaccataattttgtgctcatggcagatttccaagggagacttcaagcagaaaatctttaagggacccttgcatagccagaagtccttttcaggctgatgtacataaaatatttagtagccaggacagtagaaggactgaagagtgagaggagctcccagggcctggaaaggccactttgtaagctcattcttggggtcctgtggctctgtacctgtggctggctgcagtcagtagtggctgtgggggatctggggtatcaggtaggtgtccagctcctggcactggtagagtgctacactgtccaacacccactctcgggtcaccacaggtgcctcacacatctgcccaattgctggagacagagaacacaagcagagattagtgtcaattcattctcctggactaggctctaatcaatcgactccagggtcctggttgtatgagttcttaggattaatgaggtagaagctaattttttttttttttttttgagacggagtcttgctctgtcgccgaggctagagtgtgatggcgcaatctcggctcattcaacctccgcctcctgggttcaagcaattctcctgtctctgcctcctgagtagctggaattacaggcacatgccatcacacccagctaatttttgtatttttagtagagacgggggtttcacaatgttggccaggctgctctggaactcctgacctcaggtgatccacccaccttggcctcccaaagtgctgggattacaggcgtgagccactgcacctggcctttttttttttttttttttttttttgagacggagtcttgctcttgttgctcagcctggaatgcaatggcacgatctcagctcactgcaacctccacctcccgggttcaagcaattctcctgcctcagcctcccaagtagcagggattacaggtgcctgccaccatgccaggctaattgttttttcttttttttcagatggagtctcactctgtcactcaggctggattgtgatggtgtgatctcagctcactgcaacctcaacatcctgggttcaagcgattctcctgcctcagtctcccaagtagctgggactacaagtgcgtgccaccatgcctggctaattttttttagtatttttagtagagatggggtttcgccatattggccaggctggtctcaaactcctgatgtcaggtgatccgccctgaggctgaggcaggagaatcatttaaacccaggaggcggaggttgcagtgagccaagactgggccactgcactccagcctgctaagtgacagagtgagactccacctcaaaaaaaaaaaaaaaaggcaatgcttcaggacataaggccttgctctgaagaggccctaggagtgactcctggtgacagtgaaagcccacagcctctggcaactgtattaacatgaacttcaatctgttaaaggaaagccaccaggaaaacagcactgtaatttaacgatgtggaaaaatgtatgtaatatcttaaggaaaaaagcaaaacagtgtaattatgatcacattttataaaatacacgtgtatatatacgcacatatgcctggtggagttttatggtgatcatctccaagtggtggaattactgggattattttattgtttttgtgtaaatttatactttcttttttctttttgagacacggtctcgctctgtcgcccaggctggagtacagtggtgtgatcgtggctcactgaagcatcaacctcctgagctcaagtgatcctcccacctcagcttcccaagtagctgcgactacaggcatctgccaccacacccagctactttttaaatttgttgtacagatgaagtctccttatgttgcccaggctggtctcgaacttctaggctcccaccttgacctccatcttgacctcccaaagtgctggaattataggcatgagccaccatgcccggccttgatttatgtttttgtgatgaacattcatatcttactcccaccccatggaaacagttcatgtattacttttacaatataaaacaaataacaataaaaacatcaaaaagacattttagccattcattcaacaaatatttaaaatgtgccaagaactgtgctactcaagcaccaggtaatgagtgataaaccaaacccatgcaaaaggaccccatatagcacaggtacatgcaggcaccttaccatggaagccattgtcctctgtccaggcatctggctgcacaaccacaattgggtggacaccctggatccccaggaaggaaagagcattcaaagtgtcaaagtaggactactggaactgtcacttcatcattttttttgtttgtttttgagacagggtcttgctctgtcacccaggctggagtgcagtggtgtgatctcagctcactgccacctctgcctcctgggctcaagcaatccttccatctcagcctcctaagtagctggaactacagacacgtaccaccacccctggctaatttttttgtatttttggtagagacagggttttgccatgttgcccaggctggtctcaaactcctgggctcaacttcacccccgggattataggcatgagccaccgcacccagccttggctaatttttaataatttttttgtagacatgaggtcctactgtattgcccaggctggtcttcagctcccaggctcaagcgattctcccaccttggcctcccagtgttgtgattacaggggtggggcactggcccagcccatcatttctctctctctctttttttttgagacggagtctcgctctgtcgcccgggctggagtgcagtggcgcgatcttggctcactgcaacctccgcctccggggttcaagcgattctcctgccccagcccctcaagtagctgggactacaggcgtgcgcccctacgcccagctaatttttgtatttttagtagagacggggtttcgccatgttggttggccaggatggtctcgatctcttgacctcgtgatctgcccacctcagcctcccaaagtgctgggattacaggcgtgagccaccgcacctagcttttctctctctctctttttttttttttttagacaaagtctcactctgtcacccagtctggagtgcagtggtgcaatcttggctcactgcaacctctgcctcccacgttcaagcgatgctcacacctcaacttcccaaatagctggcattacaggcatgctccaccaggcctggctactttttgtttttttttttttagtacagatggggtttcaccatgttggccaggctggtctcaaactcctgacaagtgatccacctgcctcggcctcccaaagtgctgggattacagacatgagccaccatgcccagcctccagcccatcatttcttgatgatttgttgaaacacagtatgctggggcagtcacagagaggagggggagggacatatgggaaaaagagttagagggaaaaagtcttccctcagtatatttaatatgtgcagttctcaaatccttacccatcccttacagatggagtcttttggcacaggtatgtgggcagagaagacttctgaggctacagtaggggcatccatagggactgacaggtgccagtcttgctcacaggagagaatattgtgtcctccctctctgacagggcacccaatacttactgtgccaagggtgaatgatgaaagctccttcaccacagaagcaccacacagctgtaccatccattccagttgatctaaaatggacatttagatgtaaaatcactgcagtaatctgcatacttaacccaggccctctaccctacactctccggatgaaggcttatagcaagacctctcaatgggagagtctgtctctctgctccaaaggacaatggtcttaaaatagtaggggtatggattttaagtcaatttgccactgatatgccatgtactctggttatcagtctccataaggccacttggtataaggtttgatagtctctcaaataaaatgcttgaaagaaaaaaaaatcaaagatctaatttccattaatttgctaaattgctggctaagacactgtgtgaaaaaacacccaccttccttccctcccttcctcccttcatcctaattctgtgttggtaactgataatcacggccactgaaaataccatacttggtggtaattactgtaaatgtcaagagatgggaagataattcatccagtcaaaaaaatacatgttatcctggttagagactcagcagggaaaggctacatgctgagctggaatccatatactcaggggaataaaaatcagaagagactgtggagatgctgtgtacctggaaaatcagaactgcccaatgggctctgttggctgtgttcttcaagacattcatgtatgttgctctttcccatcagcccgtttctgggaattgctgaggtgctcctgtctgtctgactgaacgaaggttgactaactcacccccaaaataatactttctggcaaccctggtttccactataccaaagtaaaaaaacactgagaaatccttgagtggaacttggaaatttcataaaaatccaattgataactaataaagaggatggaaacaaaattacattgcagccaggttttcttgctgtcactcatctgcctgtgaccagatgctaaggcctttctctaaggtgtaagaggacctaagtccctgggcagaagcaggcacaggaggcaaaggtgggtagcttttgctgtgaaaagaacaaaccaaatttatacacacaccaaggcctttgtgctgcgcaactccagaggtaagctttatagcagtcctaagcataacattgtattaagtgtcaagtttaattagaaaatgttcatggagagggctgggcacagtggctcatgcctgtaatcctagcactttgggaggctgaggcgggtggatcacgaggtcaggagatcgggaccatattggctaacacggtgaaaccccgtctctactaaaaaaaaaatacaaaaaattagtcgggcgtggtggcacacgcctgtagtctcagctatttgggaggctgaggcaggagaatcacttgaacccgggaggtggaggttgcagtgagccgagatcgcgccattgcactctggcctgggcaacagagactcgacctcaaaaaaaaagaaaaaaaaaaagaaatgttcaccgagaatcttcccctgctctgggcccgtccgtggtgggccagctgctgtgctttcttctatgtaagtaaattaagatggtttaggaagaggagaactcctccttgatttttacctatccaaagatattttctcactaacatgttggcactaacagcagctcaacgccatctgaacacataacatactgaatcctaactattaaccaccttcatgctcttgagaagggggacaaggtatagtttttttttgccataggataacatttaggtgctgttttgtttggagagtggtagagaaatagaatagcctctagaacatttcagcaatctgaggaacccccatcgtgggatcttgcttataatactccactatgtaagacaaaggctggtgctggaactctggggttctcccaggctcttacctgtgggcatgttggtgaagggcccatagcaacagatttctagccccctgaagatctggaagaagagaggaagagagagggacaggggaatggagagaaggaaaatctagttataaaagaatattggcttttattcaaaaaacagactttcaaaaaggaagagcttttctttttcttctgttcaccacctgatgatttctgctgctacttcccagggacaagcagtccaatgtccagaacactactggatttcagaagatcttcttgaagtgcatatgtagttgacctgcactctacaggcattctttgtcattcaaggactgagcatctcacttttgtcaccaatcaggccaaggctcctccctaatgatctctgcaggtgctttaacttgttagatgcaagggaaaaaaggtccttctgtatgtttaataagaggcttggatggctagaaactcaaagttattggctgaagtttgatgtttatccagacttggtacctcaagtactcactatgaccccatcaacagaggggtctatgttgattttaggtgtacatgctccttgtctcctctgacttttttttttttttttgagacggagtctctctctgtcacctaggctggagcgtagtggtgcgatctgggctcactgcaacctctgcctccagggttcaagcgattctcctgccttagcctcctgagtagctgggattacaggcgcgcaccaccacgcccggctaatttttgtatttttagtagagacagggtttcaccatgttggtcaggctggtctcgaactcctgacctcgtgatctgcctgtcttggccttccaaagtgctgggattacaggcataagccactgcgcccggccctctctgactttcttctagccccctaaacatctgttccttccttctcactactctgagaatggccattgtatctttaggccacctaagcagtttttaatctagaagtgaagccaggttctgcctctcctcattgaactagtctgactacctggtttcctgaagacacagatcacactgcactgcctcttccacttacagggcttggcaacactgttcaaaacaactttctgtgatagtcacaatgttctatatctatgctaataaggtagccatgagtcacatatagttattgagcactggagatgtggttagggtgaatgaagaactaaacttcatattttaatttttttctttttttttgaagagatgaggtctcattctgtcactcaggctggagtacagtggcacgatcatagcttgctgcagtattgaacttctgggctcaagcaatcctcttgcctcagcctcctaagtagctgggactacaagtgcacaccaccatgactggctaatttgtaaaatttaaatttaaacagtcccatgtggctggtggcaacagtgtgggacagtgcaaattctcataaacacactggcataggttcttagcaaataacttgggtatcacttaaaaataaaccctaaaattgtatcattttggatggatatgttttgggtgactctcagtgtcttgaccttcccattgcaataaaaagaaaattgccaaggcctaaaattcacctggcttcaaagagactgcgatagagaaaaaaatcaggaagctaaaaatacacggatggccttttagaaagtggtcaccctcccccttgacagacagacggacagaaacacacacacacacacacacacacacacacacacacacacacactctcttactttaccgccagagtgaaaagaaatggcagtaggacaagtctgtgtgttttttttttttttttgagacgcagtcttgcactgtcgcctgggctggagtgcaatggtgccatctcggctcactgcaacctccacctcctgggttcaagtgattctcctgcctcagcctccctagtagctgggattacaggtgcacaccaccacacccggctaattttttgtatttttagtagaaacggggtttcactatgttggccaggctggtcttgaactcctgacctcatgatccacccgcctcaggctcccaaagacaagtctgtttgttttaagggacagcatccatctgtgccactctcactacctgtatgaataaaccgcacccccaacctgttgataggacctgcatgctcataatgctagaagttctccccaggcagccaagtggagccaaatgctgacatgaaaagtacaaaagattaggaatgtttatatccaggctaacactcagtgatgaggatgcctagttatgagataagaaatttgaagtttcgggcttggcgtagtggctcacgcctgtaatcccagcactttgggaggctgaggcaggcggatcacgaggtcaagagatggagaccatcccgtctaacacagtgaaaacccgtctctactaaaaatacaaaaaattagctgggcatggtggcgggcacctgtagtcccagctacttgggaggctgaggcaggagaatggtgtgaacccaggaggtggagtggagctggtagtgagccgagacggcgccactgcactccagcctgggtgacatagcgagactctgtctcaaaaaaaaaaagaaatttgaagtttcaggccgggcgcggtggcctgtaatcctagcactttgggaggccgaggtgggtggatcacttggggtcgggagttcaagaccagcgtgaccaacatggagaaaccccatctctactaaaaatacaaaatcagctgggcgtggtggcacatgcctgtaatcctagctacttaggaggctgaggcaggagaatcacttgaaccctggaggcagagattgcggtgagccaagatcacgccattgtacttcagcctgggcaagaagagcaaagcttcgtcttaaaaaaaaaaaaaaagaaatttgaagtttcacctctacatatacatttctcttccagagaaaaatactatggtgacatttagtattttcagaatgtcattactttgaccacatactttccatcattgctattctgcatggaggaaaaaatccaaagcactagaatttctttttaaagaggggaagaatctggtgctaatactgcctagcatacagtggaggaaaaacagaggactggctcacatggcgctcccctgtggtaaaggcagaagcagaaataaggccagcagcttttcttggcatctggaacaattacttgataggctcagaaggtaaaaacaggctgacctcagcagttcaaaactccaggcttcatttgtgatcatgtcccaaagcagttttccttaggaaattacctctactggttccctcttaagtttctataaagggacagaaagtgctcagtagaaggatgttttgttttgttttgagacaaggtctcacaatgttggccaggctggagtgcagtagcaccatcatggctcactgcagcctcgacctcccagactcaagcattcttctcacctcagcctcctgagtagctgggaatacaagagtgtgctacgacacccaattaatttttaaatttttttgtagagacagggtcttactatgttgcccaggctagtcttgaactcctgggctcaagtgatcctcctgccttggcctcctaaagtgctgggattacagaagtgagccgctgtgcccagctgggattttttttttttttttgagatgaagtctccctcttgtccccaggctagagtgcagtggcgcaatcttggctcactgcaacctccgcctcctgggttcaaccgattctctagcctcagcctcccgagtaatcctgagctaggattacaggtgcctaccaccacgcccagttaacttttgtatttttagtagagatggggtttcaccatgttggccaggctggtctcgaactcctgacctcaggtgatccacccgccttgggctcccaaagtgctgggatcacaggtgtgagccaccgcgaccagcctgggatgttctgaaatgcctggtagtgcacacttgaaaaaggaagaaaagcagactgggaacatagcacttagggagctgagaaagcagccagctcaggcctgacaggtaagtgtgaaatcttgcagactttctccctgtgaggaagtcagagttctggctaagtcatctgctacaatatgatcaggagaaagtcattgagtcttcttgggtctcatctgcaaagttgttagaatgctccattttttttccctccgtgaagccttcaacaacttttcaagaaactatagtattgttgttaagagtttagaattggaggccgggtgcagtggctcatgcttgtaatcccagcactttgggaagccaaggcgggtggatcactggaggccaggagatcaaggccagcctggccaacatggcaaaaccccatctctaataaaaatataaaaattaaggccgggtgcagtggctcatgcctgtaatcccagcactttgggagcctgaggcgggcagatgatctgaggtctggaatttgagaccagcctggccaacatgttgaaaccttgtttctattaaaaatacaaaaaactatctcggtgtggtggcacgtgcctgtaatcccagctatttgggaggctaaggcacgagaatcacttgaacctgggagctggagactgcagtgagctgagattgcgccactgcactccagactggccaacagaatcagacaaaaaattagctagttgttgtggcacatgcctgtaatcctagccacttgggaggccaaggcacaagaattgaacaaggtttgaacttgggaggtgaaggttgcagtgagcagagatagtggcactgcactccagcctgggtgacagagtaagactctggcccgaaaaataaattaacaaagaatttagacttggagctagacttcctgagttcaacttctagttccatcacttattacctgtgtgactttgagcaacttattcaacctctctgagcctcaattttcacatctgtaatataggcataattacagtacatagctcatagagttgtcataaaattgttaattagttaaaacatggttgggcctttagagcagtcccagcataaagtgatcttttttttttttttttcttttgagatcttctgtctgtcgtctaggctggagtgcagtggcgcaatctccgttcactgtagtcccctcttcttgggctcaagagatactctcaactcagccttccgagtagctggaactacaagtacatgccaccacgcctggctaatttttgtatattttttttggtagagatggggttttgccatgttgcccaggctggtatcgaactccttggctcaagcgatctgcctgcctcagcttcccaaagtgctgggataacaggaacgagccgctgtgcctggcccagtgaacattatataaattttagctattattggctgggcacggtggctcacgcctatcccagcacttggggaggccaaggcgggaggatcacaaggtcaggggttcaagaccagcctgggcaagatgagttttcagtgagctgagatcgcaccactgcactctggcctgggcaatggagtgagactccgtcttgggaaaaaaaaaaagagagagagagagcaagagagagagagagaaagacaccccagtgaagtgaaaagagcaaagtctttagattctcatctgcttaaagtcccagctcttccacttatcagctaagatctgaacccgagacgggaatccaaattacacagcctctctaaatctcttagttttatcattcataaagtagagacaatacttatttatgtggttgggatggaagagtgaaaaaagaacctgtgtgaaagtatctagcactgtgtatgtatgtaataagtcttacaaaatgaagcggcccatctctgcaaaggggagtggaatacagagtggtggggtgagatttttgtcaacttgagggagggagctttacctttctgtcctgggattctcttgctcgctttggaccttggtggtttcttccattgaccacatctcctctgacttcaaaatcatgctgaaagaaaccaaacacaacccatcaggataagagaaagagaagcttccttcaatggaagtggagcagacacgtcatatttaaggcattcaggccaggcgcagtggctcacccctgtaatcctagcactttgggagactgaggcaggcagatcacttgaggtcaggagttcgacaccagtctgaccaacatggtgaaacctcatctctactaaaaatacaaaaaattagttgggcgtggtggcaggcacctgtaatcccagctacttgggaggctgaggcaggagaatcttttgaatgcaggaggtggaggttgcagtgagctgagatggtgccactgcactccagcctgggtaacagagcgagactccatctcgcatctcaaaaaattaaaaataaaattaaaaaaaaaaaaattaggccgggtgtggtggctcacgcctgtaatcccaggactttgggaggccgagacaggcggatcacgaggtcaggagatcgagaccatcctggctaacacggtgaaaccccgtctctacttaaaatacaaaaaaattagccgggtgtagtggcaggcgcctgtagtcccagctactcgggaggctgaggcaggagaatggcgtgaacccgggaggcggagcttgcagtgagcggagatcacgccactgcactccagcctgggcaactgagcgagactccgtctcaaaacaaacaaacaaacaaacaaaaaaaccaaaaattagctgggcgtggtggcatgcacctgtagtcccagctactcgggaagctgaggcatgagaattgctggaatccaggaggcagaggttgctgtgagccacgatcatgccactgcactccagcctgggtgacagagtgaaactctgtctcaaaaaaaaaaaaaaaaaaaaaaaaaatttaaggcattcagaattgccaggcaggcagtagctgggcaccaatggctcacacctataaccctagcactttggcactttgggaggctgaggcaggaggacagcttgagaccaggagctggagacccagctgggcaacacagtgagaccccttctctagaaaaaagatacataaaacctcagccaggcatagttgcatgtgcctgcagtcccaatttcttgaaaagctgaagctggaggatcacttgagcccaggagttggaggctgcagtgaactgtgatcataccaccacactcccgcctgggtgacaaagtgagactctgctaaaaaaaaacacacacacacacacacataaaacaaaaaaaagaaagaaagaaaaagaattgctgggcagagatttgaccaaaagcaagtaaaatcattctttttggtagaccaggtgaaatgactaggatctcagctgttgaaatcaattcactgaagcaaatcttttgtgtgcagaacttaacaatcggcttttcacctcactgggacttaatgtattttaattttcaacatctatctcctctcaaaacattcacttagcatttagattagactgctaatactgtgctgttataaaggtaactgaaaaattccctatctcctaaatcaattgtatattatcatctaaggaaataaaggcttttcagatttccactgagagatttacagttaacacaaccaaaatgataaaatatacattcaatgcactaaagaaagttagaggtttttcataattactattatgactggtcatggacatgagaataaagaataatgagactggggagaaatttgaggaagaacgctcagaaacaattctgactgaaactcagattgtagggaaggccttatgtgttgccaagagtattgtgaagaaaactaaaggcaagagtataaccactggctattactaggggaagaatatctgacatttcctagttacttgaatgaggagtctagtgataaatttgtcagaagactcccatgttcatagtcctccttgtacccctgagcttcatacaatgtgtccaactgcctacttaacttctctatccagaagtctagtatacatctcaaaattcatgcatctggccgggcacagtggctcacacctgcaatcccagcactttgggaggccgaggtgggtggattacctgaggtcaggagtttaagaccagcctggccaacatggtaaaaccccatctctactaaaaatacaagtattagccaggcattgtggcaggtgcctgtaatcccagctactcgggaggctgaggcaggaaaatcacttgaaccgggaggcggaggttggagtgagctgagatcgtgctaccgcactccatgcactctagcctgggcaacagaacgagatgctgtcacaacaacaacaacaacaacaacaacaacaacaacaacaacaacaaattctcacatctaaaacagagttcctggttccattcctgcttcctgcctttcccactcccccatattccctaccatgccttcttcatctaatttaatattactaacaagatctattgttcaagccaaaacccaagtgtcactccttcaatttctctttaccttatcctccaaatttaatccattagcaagtcctctcttcaaacccatcccaaaccaaccttgtttttaaccatctccacaccaccaattaccacaaggataaaatctgaattccttaccaccaaatactatgtgatctggccctcatctatgaccttctcccattccttgtgtaatctctgcctccacacataatttgcaaattactccagctacactggcctattattattattattattatttttgagacggagtcttgctctttcgcccagcctggagtgcagtggcgcaatctcagctcactgcaatctccgcctcctgggttcaagcgattctcctgccccagcctcccaagtagctgtgattacaggcacatgccaccattcccagctaatttttttttgtttttgagatggagtttcactcttgttgcccaggctggagtgcaatggtgcgatctcagctcaccacaacctccacctcccgggttgatgaagtgattctcttgtctcagcctcccgtgtagctgggattagaggcacgcgccaccacgctgggcaaatttttgtatttttagtagagacagggtttctacctcagtgatctgtccgccttgacctcccaaagtgctgggattacaggaatgagccaccacacccagccgtgcccagctaatttttgcattttttagtagagatggggttttgccacgttggccaggctggtctcaaactcctgacctcaggggatctgcctgcctcggcctcctagagtgctggaattacaggtgtgagccactgtgcccgaaccttttatcattattatttcttgagacaggagtcttgctctgtcgttcaggctggagtgcagtgatgcgatcttggctcactgtaactcctacctttcggttcaagtgattctcctgcctcagcctctggagtagctgggattacaggcactgggattacaggcacacaccaccacaccatgctagttttttgtatttttagtagagatggggtttcaccatgttggccaggctggtctcgaactcctgacctcaagtgatttgcctgccttggcttcccaaagtgctgggattataggcacgagccaccacacacgaccaacattggcctatcttttaaaaaataaaccaagctctggccgggcacagtggctcacacctgtgatcccagcactttgggaggttgaggtggttggatcacttgagttcaggagtttgagaccagcctgaccaacgtggtaaaaccccatctctactaaaaataaaaactagtcgggtgtggtagcacgcgtgcctgtaataccagctactcaggaggccaaggcaggagaattgcttgaacccaggagacagagtttgcagtgagccaagattgtgccactgcactccagcctgggggatagagggagacaccatctcaaaaaaaccaaaatacagaaatcaaaaaaccacactcattattacctcaagacctttatgtttgctattcctctgcctataagatgcattcccttcatttttcaaggacaattatttcttgttatttaggtctcagctcaattttttcagaaaggctttccctggcctccttaaacgaaagtaatcaacaacctttgacagctaatactattccactgttctgtatatttctccatagcatttattgttatcttaaattcatctttattgtgtatctcccctcgacagaacctgaatcctaccagggacttagttagtcttatttactgttgcattcctagtgcccagaacacagtaggctcccaataaatagccactgaataaaagttaaaaccaacaaaaataatcatttaattaattatgaatacatcgaattgtgcacaatagtttataaaattactttttttttttttttaagacagggtctcattctgtctcacaggctggagtgcagtggtgcaatctaggctcactgcaacctccgcctcccgggttcaagtgattctcctgcctcagcctccccagcagctaggattacaggcacatgccaccacgctcgactaatttttttgtgtttttagtagagacaaggtttcaccatgttgaccaggctggtctcgaactcctgacctcaagtgatccacctgccttggccactcaaagtgctgggattataggcatgagccaccacgcctggcctataaaattactttcacatttcattttgcctgatctgttgtcacagaagttctcagatggctgttctgaaattattcctcctcctacactctatcttatttacttctcactgttctcagtatcataaagtgcaacatctttttgaagcaatctgaattataaacagatacatttgcatgtatatatatgtatatatgcatatgcacacacacacttttttttttttaagagacagggtcttgctctgtgcaagtgcaagagtgcaatggtatgatcatagctcactgcagccttgaactcctgggctcaagtgattcttctggcttagcttcctcagtagctaagactacagaagcacactgccatgcccggctaattaaaaaaaaattttgtggagacagagtctcactatgttgcccaggctggtttcaaactcctggcctcaagtaatcttcctgtctcagcctcccaaagggctgagattataagtgtgagccactgcatctggactgcatattaatatgaagagcttttcttcaacaacagtgaacagttttctacaaaggtatatgcaagtgggcccacttcttgttcttatgaatcttttctttccttttataaaactccttttcctttctcttttccccaaagaaaggactgtttcttttgaaatctagaacaaatgagaacagaggatatcctggtttgcgctgcaaaattttttttttttttaagacggagtctcgctctgttgccaggttggagtgcagtggcacgatcttggctcattgcaacctccacctcccgggttcaagagattctcctgcctcagcctcctgagtagctggaactaaaggcgcatgccaccacgctgagtaattttttgtattttagtagagacagggtttcaccatgttgcccaggctgatctcgaactcctgagctcaggcaatctgcctgtcttggcctcccacagtgttaggattacaggcatgagccactgcacccgattttttttttcttttgatggagttttgctcttgttgcccaggttagagtgcaatgatgcgatctcagctcactgcaacccccgcctcccaggttcaagtgattctcctgcctcagcctcccgagtagctggaattacaggcaagtgccaccaagcccggctaattttgtatttttagtagaaacggggtttctccatgttggtcaggctggtcttgaactcccgacatcaggtgatccaagcgcctcagcctcccaaagcgctgggattataggtatgagccacagtgcaggcctgcataattcttgatgatcctcattatcatggaaaatttgtgcattgttaaggaaagtggtgcattgatggaaggaagcaaatacatttttaactatatgactgaatgaatatctctggttagtttgtaacatcaagtacttacctcattcagcatttttctttctttaatagactgggtcacccctaaagagatcatagaaaagacaggttacatacagcagaagaacgtgctcttttcacggagatagagaggtcagcgattcacaaaagagcacaggaagaatgacagaggagaggtccttccctctaaagccacagccctttaataaggcttgtagcagcagtttccttctggagacagagttgatgtttaatttaaacattataagtttgcctgctgcacatggattcctgccgactattaaataaatccctagctcatatgctaacattgctaggagcagattaggtcctattagttataaaagagacccattttcccagcatcaccagcttatctgaacaaagtgatattaaagataaaagtagtttagtattacaattaaagaccttttggtaactcagactcagcatcagcaaaaaccttaggtgttaaacgttaggtgtaaaaatgcaattctgaggtgttaaagggaggaggggagaaatagtattatacttacagaaatagctaactacccattttcctcccgcaattcctagaaaatatttcagtgtccgttcacacacaaactcagcatctgcagaatgaaaaacactcaaaggattagaagttgaaaacaaaatcaggaagtgctgtcctaagaagctaaagagcctcagttttttacactcccaagatcaatctggatttatgattctaaaacccctggtgacagaatcagaggctgaaaacaccactaattataaccagcaggtatggatatttggaagtctaggggaggctgatatgaagttaagaccagaggaaatatctgtccactccctcttctcaacacccatcttctagacgccaaggctagctatagatctccattatagtgttcaaggaattaggaattatccatgtcaatagttttgattaatgtggacggagaacatctatattactagatggcaatatgtgaaagaagaaaacagtattgttgaaaacctaaatctgaaatgtcaatgtaatgacaaattttcacccctagaatgtctacctggggagtcctaaccctctaatattcccctgagagggatgggagaatacagtgcagagcttttatataagtatttcagaaagcagtagctaaagaatcacttgtttatttcccagtgtttcaaaggcccttctgaagaactaagcaaactaaggaaagaccatttagttttaaacaggagaaatgtatttaactaaatcctaaacacagcaggctatctgcaagcagcagcagcagcagcagccatgctccctcacagaatccttacaatttttgaagttttttgtttaactgctacaaaagccgatttagtaacatttattacacttaaaaacttcagttcatttgtagttcaaagcaaatgtattggctttgagtttaaagactgaactactttagatttgatttgcatttttttttttttttttttttgagatgcagtcttgctctgtcagccaggctggagtgcagtggctggatctcagctcacggcaagctctgcctcctgggttcatgccattctcctgcctcagcctcctgagtagctgggactacagatgcccgccaccatgcccggctaattttttgtatttttactagagatggggtttcaccgtgttagccaggatggtctcgatctcctgacctcgtgatctgcccgccttggccccccaaagcgctgggattacaggcctgagccaccacgcttggcatctttttacctttcattaactttgatgcaaacctatagcttaaggtatcttaaactttaatgacatttttctctaaaatagtagtttgtaataacttgttctggcacctggctccaatgaacactaccctctgaccctgtggtataattttcatgagtaagtggaaacctaagatcttagaagttcaacggcaatgtgtccaaggggtttagatcctctccttaagtgcctgtatctctgtgaaaagaatcatcataggctaggcgcgatggctcacacctgtaatcccagcactttgggaggccgaggtaggtggatcacctgaggtcgggagtccaagaccagcctgactgacatggaaaaaccctgtctctactaaaaatacaaaattaggtatggtggtgcattcctgtaatcccagctactcgggaggctgaggcaggagaatcgcttgaacccgggagggggaggttgcagcaagccaagatcgtgccattgcactccagcagcctgggcaacaagagtgaaaaactacacctcaaaaacaaaaacaaaaacaaaagaatcatcatcaagtgaactggaacacatccagagaactaattttgttagaaagattttagagttgagccacacaatctgcatcttctgcgtcctccatgcactcgtctgctttctggagccccatgagtgagtcttaatcctgttccagataacagttctcttccgggtaacggttcttcagatacttgaagacagtgtcttatttccttaaatcttctcatttcttcttcaaaagacagtatttcaagttacttttatgtatctttaccatctacctctggataaacactctccaatttgtcagtgaccatgttaaaaaccaagcacggtgcttaaaactgacatcatctttcaggcaatcactccattggagaatacagtggggctctggatctgtacttcacttgctccagagcctctgcttgtgttaatacggcccagtttcaaataagcatttttagcagccctgaaatgtgtactcagatttagtttatagtcaactaaaaacacccagaggtctcctgtattacacaagttataattaaaaccttaaaagagaaaggtataggacaaatgatctgtctcctcccttttttgctttttcatatgttaagactatctcggagctgttatcagacttttttcctgaaaaactctcaacaatactcaaactaggtgttacatgaagctggggtctccaggttttgcctcacttgttctttcttttgttgttgttgagacagagtctcactctgtcgccaggctggagtgcagtggcaggatctcagctgactgcaacctcagcctccagagttcaagcaattcttctgtgtcagcctcccaagtagctgggattacaggtgcacaccaccacgcccagccaatttatgtatttttagtagagactgggttttaccatattggccaggctggtctcgaactcctgaccttgtgatctgcccgcctcaggctcccaaagtgctgggattactgatgcgagccaccgcgtccagctgcctcacttgttgttttaggacttaggctccacctcaccagtgtagtcccagcaggtagataggagttaatagttgactatctcagctcaccaccctccaaaccttttttttttttttttttttttgagacaagaatctcgctcttgtccccaggctggagtgcaatggtgcgatcttgggtcactgcaacctccacctcctgggttcaagcgattctgctgcctcagcctcctgagtagctgggattacaggtgcctgccaccacgcccacctaatttttatatttttagtagagacggggtttcaacacgttggccaggctggtctcgaactcctgacctcaggtgatccacccgcctcggcctcccaaagtgctgagattacaggtgtgagccaccgtgcctggcccacactccaaatcttaacccaaaacaaaaggaggtaaggaagcagcaaaactattatttgtctttcataaagtaattgattgactattagaagactatcatccatgctatgctcaacaaatattcttattttttcacgttttttttttttttttttgagacggagccttgctctgtcgccaggctggaatgcagtggcatgatctcggctcactgcaacctccatctccccggttcaagtgattctcctgcctcagcctcacgagtagctgggactacaggcgcacgcgaccacacccagctaatttttttattttttagtagagacggggtttcaccatgctggccaggatggtctcgatctcctaatctcgtgatctgcccgcctcggcctcccaaagtgctgcgattacaggcatgcgccaccgtgcctcgcctcatgtggttttatgcagcagatgcaaggtattctgtaaaggttcttggtatacctgttttcataacaacatgagtagtctcttcagtaattagattagttaaagtgatgtggtgttttctggcaaacttgtacacgagcatctgaaattaaatcaaatattccattatcatgagttacctctagcacacagctcagaatactagttattccaccatggcatatgtttacctatgtagcaatcctgcacgttctacacgtgtcctggaactatttaaagtgaatttttttttttttttttttagacagagtcttgctctgtcacccaggctggaggtaaaaaaaaaaaaaaaaaaaaaatagaataccagttatcctagctttaagtctctgtttttctcagaaagggtacatttaaaaaattctaagacacctgaagtctcggctgggcgcggtggctcacgcctgtaatctcagcactttgggaggctgaggcgggcagatcacaaggtcaggagatcgagaccatcctggctaacacggtgaaaccctgtctctactaaaaatacaaaaaattagccaggcgtggtggcgggcacctgtagtctcagctactcaggaggctgaggcaggagaatggcgtgaacccaggaagcagagcttgcagtaagccgagatggcgccactgcactctagcctgggcgagagtgcgagactccgtctcaaaaaaaaaaaaaagatacctgaagtctcaaataaatagtttaataaaaattatgtacacatcagcagacataaaattacaactaaggattcaaaataatattataaacctactacgtaccacaaaacttaaaacttaaaaaatatatactgggccagacacggcagctcatgcctataatcccagcactttgggaagctgaggtgggaggactgcttgagctcaagagtctgagaccaagaccagcctgggcaatacagtgagatttcatgtctttaaaaaaaaaaaaaagtaaaaagaaaaaatatatattaattttgctttaatagcagatatcattcgattccctaagatcgtttctttgcatagtgacactctactgtactataaatttatcagcctacactttataagctgagaggtaactagcctacacagaaagttatgctacagatatacatggcttaaaaccaagactcaaccctctgatagttacaaaacactgaaatcaggatgttactaaaggtcagtgcaaaagcgatcaattctctcgtaagaaggcttagaaggggttcatgttcttccccaaagaaatttagagtcctctagctattatctatcaaccaaataaaaatcaataggcagcaaaagaaattaaccagatcaattatgggcacagttgacctagctggtaggtattgtctgataaataactttgtttaccaagggccatcatttactagccatagccacagccactcacaccagtatttacgtgttgcacaatactgccatgaaggtcaggccatctttctttcatgttgcctcactccatactgccacagggcactgaaaaaaggcaggctagagaagctaatgacatcctcccccttttgctaccaccctccgccaggatcattagcaattctgaactgattaattgctgaaatcccagccttgaaactgttcagttagaagagcaatgctgaactgctgaaaagatcatcttaatatgggcttcagaattaatcatgtgtaatacagtcagtagctttcatcataaatttaccacacttcaccaagtctgaatagagctcaaagttttcctcttcgcttgtttaaagacaacatgtacccaagccacttgtagtctaatctgcagctcagaattgcctttgccaagaaagattagaccattttagccatctctaaaaagctgaacttgcaaaacaaagggataaagaacgctaattttcaatgaataaataaggaattctggacgtgcaggcaagtgatcaagagccattgaaacagacacaggtaagagctttcagagcaaattgctggtctggacatgggattatgagatgaaaacatttatagccatcactgtgcacttactcattgtatctaccagggcagccacagcttactttgcccttttagtagtgggatacatctggccacagagatgttatgctaagtaactacctatggagaagttaggatgaaaaatcctaggaaggatatattaataaagatatttcagaatgacttggtcatctctcagtgtgcaataaatggcacacccactactgaatccatttgataatctggtatgttatctcatcatagttttaaagaaatattcacgcaattcttcttcttattattgagacagagtttcgctcttgttgcccaggctggagtgcaatggtgcaatctcggctcaccgcaacctccgcctcccgggttcaagcaattctcctgcctcagcctcctgagtagctgggattataggcatgcgccaccacgcccggctaattgtgtatttttagtaaagatggggtttcttcatgttggtcaggctggtcttgatctcctgaccttaggtgatctgaccacctcagcctcccaaagtgctgggattacaggcttgagccaccatgcccggccatgcaattatttttattatgaagtgatgacaatgacaattaattacaggggtggtaaacttctcaggatgtctgaaatccacaaatagcccaagcagaaacgaggttttactggtcttaatattttaatgggtatttttccacagtatgaagcaattcccatttctggcattaaggacccaaggtgatgccaaaatcctaatagcaagggatattgcagggcagaagtggcagggcattcttacaagccaggatgaaaacaaacactagagaaatgctactatctggcagtacatttggaaccagtctgaatttagttaaatatgctggtaaattcacccatgtgagacaagggggagaaaaagatgccttctggggaataaaactatacctacttgcttttacagatagaaaggaaaattccaattcgaaagtcctatatcatacccaaagtatagcttttccactaatatttaataattattttctcaagtaaatatacataaaataatccacactatagctttatctagatctaaattttcagaaattagtaatcgaaattaaattacacagaactgtgattgttttctagatttcttcctctaggttattaattgacaatacctacataaaactctttccagaatgttgttaagtcttagtcattagggagatacatatggatacactcacaaattcttctggggtcaggccagacaccaccatggacattcttttgttgaccctttctgttgaagctgtcaattctggcttctccctgctcacactttcttccattgcattatacccagcagtatcagtagtatgagcagcagctggactctgggcagattctgcaactttcaattggggaactttcaatgcagaggttgaagatggtatgttgccaacacgagctgactctggggctctgtcttcagaaggatcagattcagggtcatcagagaagaggctgattccagattccaggtaaggggttccctctgaaaggaatgggagaagtttaatttacacaacgatgaatgttgaattacaaagttctggtctctgttaagaattaaaaagaccaataaagttaggttaagagaaaaatgggtacatgaatacagtgttggtggaaatccaaagtagcttagtttcctaaaaaggaaatatggcattatgtagcaaacaccttaacacgtatttacactttcagtcaacaatgctagttttagaaatatatcctagggagataaaagatatatgcaaaggtttagtcataggaatagtataattttagaaacaatgtagttgtccaataataggagattaaattacgatatacctagtccaatggagtactcttcacccattaatttgaatataaatgttgatgtacaataaaacagaaatgttactaatatattaaagacacctaagcaatattatttatcatgacattattttaaaaataaaagtttatgggccgagcacggtggctcacacctgtaatcccagcactttgggaggccgagacgggtggatcacgaggtcaggagatcaagaccatcctggctaacacagtgaaaccctgtctctactgaaaatacaaaaaaaaaaattagctgggcgtggtggcgggcgcctgtagtcccggctactagggaggctgaggcaggggaatggcgtgtacccgggaggcagagcttgcagtgagctgagattgagccattgcattccagcctgggcaacagagcgagactccgtctcaaaaaaataaataaataaaaataaataaataaataaaagtttatgtaaaatgactaaagaaacacagaaatattttattattaaagaataagagtacaggccgggtgcggtggctcaggcctgtaatcccagcactttgggaggccaaggtgggcggatcacctgaggtcaagaggtcgagaccagtctgaccaacatggagaaaccctgtctctactaaaaatacaaaaaattagccgggcgtggtggtgcatgcctgtaatcccagctactggggaggctgaagcaggagaatcgctcgaacccaggaggcggaggttgcgctgagccgagattgcgccattgcactccagcctgggcaacaagagtgaaactccgtctcaaaaaagagtacgggtaatatttttttttttgagaagggtctcggtctgtcatccaggctgcagtgcagtggcacaaacatggctcacctgcagccttgacctcctggactcaagtgatcttcctgtctcagcctcctgagtagctgggaccacaggtgtttgccaccttccagctgattttttttttttttgagatggagtttcattcttgttgcccaggctagagtgcaatggcgcgatctcagctcactgaaacctctgcctcccaggttcaagcgattctcctgcctcagcctcccgagtagctgggactacaggcataagccaccaagcctggctaattttgtatttttagtagagacagggtttctccatattggtcaggttggtcctgaactcctgccctcaggtgatctgcccgcctcggcctcccaaagtgctgggattacaggcgtaagccacccaccacgcctggccccagctagtttttttttttttttactttttatagagatcaggtctcgctacattgcccaggctggtcttgaactcttggcctcgagcaattctcccaccttggcctcccaaagtactgagattacaggcatgagcagtggctgtaatctgtccttattttatcttttaagaggtggcatctcagcttggtgaagtggctcacacctataatcccagcactttgggaggccaaggtaggaagattgcatgaggccaggagttagagaccagcctcggcaacataacaagacccgtgtctaaccccaccccaaattatcttttttattccctatattgtccaatttgggggcaatgagcttatagcaattttgtaagaaaggaaaaaaaagttgaaaaatgtggcaaatgctttatttttgtttcttcatccaaggtaatgacaccattacttttttcacttaataaatcagcagatatcattaccaaattaaaaacagcagagatgtcatccttgaaacatttcagaaaatgccatggtatcaggaattaagcatagctaagtagaatgtatgagattcctaaaatgaccctaatgaacatggccaaataccacatttgatgccaaacagtgtcttttatgataacgtgtttttgaggattaaaaactttctttactgattaaaactctgatttacaagccataaaacaccattcattaaaagtgatttttaaggcataaaatatgtagtcatttatattcattaactcataaaaaaaacttgctttgggatttgactcattttctaataaaggactggcctaaaactttattctttggcctttggactcttgtctaacagttgaaataaaatatatgtgtgtatatatatatatatatattttttgagatggagtcttgctctgtcacccagactggagtgcagtggtgtgatcttggctcaccgcaacctccgcctcccgggttcaagtgattctgctgcctcagcctccagagtagctaggattacgggcatgcactagcacacccagttaatttttttgtatttttagtagagacagggtttcaccatgttggccagacaggtcttgaactcctgacctcagctgatccacctgcctcggcctcctggagtactgggattacaggcgtgagccactatgcctggcctgaaataatacatttagagtacaccaagactccctcatcctcaaaatcattagttaaaccattaattaaaatatagatggattaacagtttcaataattttcaagtaaaccttgattaacacttgagctatttttctaaagtgggcttaattaagtataacaaaagtgtccatgatagactagtacatctaaaagttggttaaccagaatatctttatgtaggattcagagtaaaatcaaagtgtttgttccaatacagcagatgaaatattacctagatcttgccttggcaagtaagatgtttccgtcaaatcgtgtggcccagactcttccagctgttgctcctccacatcaacaaccttaatgagctcctcttgagatgggtagtttctattctgaagactcccagagcaactgtgcatgtaccacctatcatctaatgatgggcatttagaaggggatgacctagaaagataaatggaaggagaaaaccatcgccaccaattgtgaaaggacaaatcatacttgctgggcagccaaagcataaatgaaacagctcatgtcagagagatcagaaatgactggcaaaaaagagcccgcaagacagcctagaagtctggattcatgttgcctgccaatatgtcagggttgacatataacatggggttgggttggtctgaggcaccatatctcccagctgtttaaaagcaggtcagtagctgggtgtggtggctggcgcctgtaatctcagctactcgggaggctgaggcaggaaaattgcttgaacctgggagacagaggttgcagtgagccgagatcacgccactgcactccagcctgagtgacagagcaagactctgtcaagaaagaaaggaaaggaaagaaaggaaagaaaaggaaaggaaagaaagaaaagaaaaggaagggaggaaggaaagaaaggaagaaaggaaagaaaggaaagaaagaaggaaagaaggaaggaagggagggaaaggaaaggaaaggacggaaggaaggaaggaaggaaaggaagaaagaaaggaggaaagaataaaagcaggtcagcaaatttttaccaaattactcactgccactcactctatacacaatattctacttgagtctaaatggatatgttagaatcagatctcttatgaagatagaaagttgatcaatgtcgacatctctacactcattctttctactcagttttagcagaattcacagaatcatccctattgcctgccttttcaatgttcaaattcattctaaaaacaaaagccagctataaaatattgttagaaaagcatacacacccagtaaatagttcctctgctcttccaagtgcttaggactttgcaaaataagatacttatcaacagatttaaagggcctcagaggttaattaatttaaacaattattgggtgcttactatgggtcaaatactaaggctaggccccctggattgaagatgggtgagacctgaattactgctctctctctctttttttttttgttttgagacggagtcttgctctgtcgcccaggctggagtgcaatggcacggtcccagctcactgcaacctctgcctcccaggttcaagcaattctcctgcctcagcctcctgagtagctgggattacaggcacctgccaccacgcctggccctccagtaaggaaaagaatagtactggactacatagtccagtactggactgctatacagccctgtgttaatagtggtgtaaatacacatctctgaaagatattctaaatgttttctggctttgggagggcaaggcgggcggactacttgagtccaggaatttgagaccagcctgggcaacaaggtaaaactccatctctaccaaaaatacaaaaacttagtgggtgtgggtggcgcatgcttgtggacccagctactcaggaggctaaggtgggaggattgcttgagcctgaaaaacggaggatgcagtgagccatgactgcaccactgcaatctaggtgacacagggcgaccctgtctcaaaaaataataataatagtaattattattattattttctgtggtaaatcaacagctagactttttctagaaagacaagaattttaattagggcaagggctgccttgaagaagtctaccatcagtttccaagcttgttcaggttttacctccattatatttttttctgaccttcagaagggacatatctatctaaccgcacatttctcatgttgtagcttatgttataggttcaaaaaacctatataggattaaacaaaagaagtatcctagagcaataaaagtgtataaatgcctgtatgcaaaaaactggagaaagtatggtgaaaaaaattaacaatcagagttcaatataaataaagatgtcagataccacagcatctttacattgatgtttcttacctttccactcctggttctttatttttactggtagaactatctgcagacacctcaaacttgtcagcagaaaggccttctggattctggcttatagggtattcactacttttctgtgaagttaatactgctttaaatggaatgagaaaacaaatctactttactgctttgttctgatagtgataattcaggttagaatactgatttttttcaaaagcatcaatctatgatacacaaattggtttttaaacaagtatatcaggcagaattttataaacacaagcaatgcaacagacagatgctagcaccaaatggaattcaatgattaaaaaataataatgataataaaaggaacactttaagacagagtaaataaagacacccagctgagacaaggctgaaaaaaaaaatctatattccttggccctgaatgataaaaaatatatataacaaatttttatctctgcagcaaaataaattatgcccaaatcccctcagacaataggaaagaaagagtaccggagagcacaaagtacattattttctccatccctactgcctccacattgaagactgtatgaaatggggatttcagcttctgcatgtcgggggtaaacaagacatgagtgtcagacatgaaagaaaaaacaggtgacattttgcttcacattttcaattaccgaaaaaaaagaaaaaaacaaataaaccccctaaaccaacacatacacaaaaaaatcccaaggtgctggttgataagaaatcttaaataatacatggaactaatgatgaaatggcacaagaagggaaaaatcacaaaacatactgaaggcaaagttctggcatgttagttctttttttttttttgagacggagtctcactctgttgcccaagctgaagtgcaatggtgcaatcttggctcactgcaacctccacctcctgggttcaagcgattctcctgcctcagccttcctagtagctgacattacaggtgcctgccaccacgcccagctagtttttttggtatttttagtagagatgggattttaccctgttgatcaggctagtctcgaactcctgacctcaagtgatccacccgccttggcctcccaaagtgcggggattacagacatgagccactgcgcccagcctaattcattttgtaatatatttactcctccaaatgtatcactttgtgccactgccttctaggaagtggcttaaaggcagaagtacttatttatttatttttatttatttattttttttgagatggagtttgctcttgttgcccaggctgcagtgcaatggcatgatcttggctcaccacaacctctctgcctcccaggttcaagctgttctcctgcctcagcctcccaagtagttgggattacaggtatgcaccacctcgcccaactaattttgtatttttagtagagatggggtttctccatgttggtcacgctggtctcgaactcccgacctcaggtgatctgcctgcctcggcctcccaaagtgatgggattacaggcgtgagccactgcgcccgaccgttatttttcaacgagatgggtgtcttgctgtgttgaccaggctggtttcaaacttttttttttttttgagacagagtcttgctctgttacccaggctggaatacagtggcatgatctcggctcactgcaacctctgcctccaggttcaagcgattctcctgccttagcctcccaagaagatgggattataggtgcccaccaccaccccttggctaatttttgtattttttgtagagatggggttttaccatgttggccaggctggtcttaaactcctgacctcaggtgatccgccaaccttggcctcacaaagtgctgggattataggcatgagccaccatacccagcctggtctagaactcttaaactcaagtgatcctcctgccttggcatctcacagtgctgggattataggcgtgagccaccatgcctggccaaggcggaaatatttaataagtaaaaacaaatagttaaaaattgcaaaagtcttctattcattaaaaagtcactgatgactgtaattcattttgagcttttattagaaaagctaaaagccataaatataggtagaaaattgaaacaaaagattgtattaattaaactgtttttttaagacactgggtagcctggggggaaataatcattgatttcctgagttagtcttcaaatgcattatttatagtttcctttatgcttgtcttttctggacctgtgagtttctaggattgttaagaactctgttgaaagtaagtaggatctaactatgaagagaggtatcatcctccccacccccaatacagggtgataattgataaagggtaatgtgcaagttccaaggaaccatatcaaacggaattaaccattggaaagagttaaaaaagtggccaggtgatgtggctcacgcctacaatcccagcactttgagaggccgaggtggacagatcacctgaggtcaggagtttgagaccagcccggccaacatggtgaaaccctgtctctactaaaaatacaaaaattagctgggcgtggtggcgggtgcctgtaatcccagctacccaggaggctgaggcggacattgtaatgagccgaaatcacaccattgcactccagcctgggcaacaaaagtgaaacttcatctcaaacaaaaacaaaacaaaacaaaacaaaaaaaatgaaaggcagagggaaggctcagatacaaacacagctattaaaaagtcattcctccttttggccagaaccaccatctttcagtaatttgccaaaatgacgaacacaaagggaaagaggagaggcacctgatatatgttctctaggccttttagaaaacatggagttgttcctttggccatgtatatgcgaatctgtaagaaaggtgaaattgtagacatcaagggaacgggtactgttcaaaaaggaatgccccacaagtgttaccatggcaaaactggaaaagtctacaacgtgacccagcatgctgttggcatcgctgtaaacaagttaagggcaagattcttgccaagagaattaatgtgcgtattgagcacattaaacactctaagagccaagacagcttcctgaaacgcgtgaaggaaaatgatcagaaaaagaaagaagccaaagagaaaggtacgtgggttcaactgaagcaccagcctgctccacccagagaagcacactttgtgagaaccaatgggaaggagcctgagcagctggaacctattccctatgaattcatggcataataggtgttaaaaaaaaaaaaaaaagacctttggactgtaaaaaaaaagaaaagtcattctatcaccagaacatttagcatataaattcctcttcttactacaatgggcctcatgcaatgaagcaaataagataacttgttagaagttaacaactcaatagaacctgaaaaacagagcaaaacctttctgcttttttttctccttaatccttaattcattctctgaacagcaagcccaacctaagccttgtgacatgatgatctacttgctggctggtttaggaaagtctaaatgcagagatccagagtccaagtttcagaatattattgtagttcctcttaaatcattccctcatctagatgtcttaacatgttacattctttgtggataggaagtatgggccacaccaaacatttaataaacttacagactgcccactgtgtgctaagcattgtacagggtattgtgaagaattaaggaagacactggaagacaacagatattaagaaataataaactaggccaggcaccgtagctcccaagtaggtgggattacaggcatgtgccaccacgcccggctaattttttgtagttttagtagagatgtggtttctccatgttggtcaggctggtctcgagctcccgacctcaggtgattcgcctgccttggcctcccaaagtgctggggttacaggcgtgagccaccgtacccggcaacaatattctttttactagaagttctggccaggtgccatggctcacacctgtaaccccagcactttgggaggctgaggtgagaggactgcttgagtccaggagtttgagaccaacttgggcaacatagggagaccttgtctctacaaaaaataaaaaaaaaaattagctgggtatggtggtggacgcctatagtcccagctacttgggaggctaaggcaggaggatcgcttgaggaggtcgagaggctgcagtgagctgtgattatgccactgccctccagcttgggcaacagagcaagaccctctctataaggtgaggctcaggtcggggaggatggctcaagatcaggagttcaagaccagcctagttaacagtgcgtccctgtctctacttaaaaaaaaaattaaagaaaagaaaaaattatttttaaaaagttcatttgagtttcagttagactcacaccagatttagggagaaaaaggctcaaaacttatgttggtattaagttgtgatatccaaaacaattcagaaattaagcatttcagttacagatctccagaaaaaaataaacacacgtatataccaaagaggagatagtagatttacacagatattcaaagtcacacaataataacattttaaatcttacacattataattgaaagtctagtctgtgtttagactgaagatggtgaaagtaccctaaagaagagtattatactggggatgggactctgatctctcattatctgagagatgaactaaatgaagatagttacaaagaaagcatttaaggaaatacattttgaagcactgccatagcaacagagtttctagctagcttctttatccaagagctactgtttcttcctgaacacaaaaatactgcaaggcacaactggggaccaaagccactgttctgtataagtagcagacttgagttcctagaaagactccaagaaaggtcttaaagttcccagttggactgtggaacggggtgctgaagaaggaactttaacactcagataagaatcactgagctaggaatgaagtgtactttgggagtactcaccacccctgcatgtttctaagcagcatcctagtggggaccccatgcctagcatctcctatgtgtctgtttgtttgcccctatttaaaaatctgcctgatgtattgtctttccaattaaaaactcaaatttccatctcactttccttcatttatgccattattcctcagctcagtgctcacttcttataggaagtcagctctgatcaactgcatctgcctggttactccaatggcatcctctcagaggtccatctggattttttttgataactgtaacattgctataaagcacttgactctattgcataattaggctttctgtgttgttcttttcttttccttttgaactaacaggagctctacatcactaggctttctgtggatcaaagtgcagttcctgaagtataggatgtctctccctataaatcagaagcacattaaataggtctttgtgatgtgacaccagtgttataaggaatatgtctgagtactttttcatagctttctgaaattatggggttgcctgtcaccaatttctcccattccacttagcttccaatagagcaagagctatgttgtataccatgtatcttccatgggctccccatagcatctacttgttgtaggtactcagatgacaacatgaatgactgccttgggtccctctgactggtatattagttgtgagcagggacaagaaccaaggctccataattacccatgtgctgagcaaggatcataaaatgttggagctaggtccttactcttcagaaggagataaaggggaaggaaagaattttgcttaagatatcagtgtttggccaacaatacacacctttttctgatgtgctttgttctggatttcgcaggtcctcaagggcagaagagtcacttatgatggaagggtagctgttagaaggctggctcccatgctgttctaacacagcttctagttcagccatttcctgctggagctttatcaggttatgttgcatggtatccctctgcttcaaaaacgataaatggcaccaagaaaatgaaatactttgagaagctttccattaaatgaaaatatatcatacaaattaattttagcacaggaattgaaatcacctagtatggaactacaagttctagctgaacaccttttaatctaaccacattcatgcaattaatgcccatgaaattatttccaaatgatgttagtgagggaaaaaatcctcaaattcccccaaatagacttgatgttattgtgatgtccttttgaagttggttattttcttttaaagctagggagtgaaaaaataattaaggcatttaaacactatcgatatttaaaattagcatgaatctgttaacattttatttatatgggcacatttcaaagacttggtgttgtgagattcatcagacatttaggttagttcatataaaaatgtgtgatttttagactgatgtaatgttgaaaaaagccctctatctatggcattttataaaaatacaacaaatataaaaatactatcagtaatcctgcctagattactggcttgtgaggactcttccttttctgggattctttgaacctttagtttcttttctttctttctttctttttttttttaagtctccctctgtcacccaggttggcaccatctcggctcactgcaacctcttcctcccaggttcaagcgattctcccacctcagcctctcaagtagctggcattacaggtgcttgccaagacgcccggctaattttggtaatttttgtagaaacagggttttactatgttggccaggctggtcttgaactcctgacctcaagtgatcagcccgcctcggcctcccaaagtgctgggattagagacatgcgccattgtgcctgacctgaacctttagtttctaacagaaaaagcaaaaagctaattcatgaatctatctgtttgctcagttaattagacaactatttactatctattaagcaccaggcgctgtcctagtactgaggatatagccctcatggtgctgccattctagacagggacatctcatctagaatgtgtccacctagagatcattagcaaggacctgtgagagggaaggatccaacagaaagagccctgagaaagcctgtaaggatagttactgtttttaaaataatgagttctttttgcttatgggctcctgttgtttattggtccatttcaaagaagagtgtgctaagtccaagtatttgataaacaaagaatttaggtatgtaaggagttttccaaaatatccttcttaagaatttattttatttatttattttttttgagacagtcttgctctgttgccccaggctggagtgcagtggtgcgatcttggctcactgcaacctccgcctacctggttcaagcaattctccctgcctcagcctctcaagtagctgggattacaggcacctgttaccatgcccgactaatttttttttttttttttgagacggagtctcactttgttgcccaggctggagtgcagtggcgcaatcttggttcactgcaagctccgcctcccaggttcaagccattcttctgcttcagcctcctgagtagctgggattacaggcgcccgccaccatgcccagctaattttttgtatttttagtagaaatggtgtttcaccgtgttagccaggatggtctggatctcctgaccacatgatcctcccgcctcggcctcccaaagtgctgggattacaggcgtgagccaccacacctggcctaatttttgtatttttagtagagacggggtttcaccatgttggccaggctggtcttgaactcctgacctcaggtgatctgcccgcctcggcctcccaaagtgctgggattacagacgtgagtcactgtgcctggcttcaaaatatacatgtttaaaaatcacttttagaaggaacagcaatggttgccaaaaagtccagtgggggagtagggcaggaacacattgtttcactctccgtttcttcttctgatccttaaaaatgactttgccctttactaaaaacaagccatcttctttctcctgctacactgagttcacaattttcaggaggtttttatgaccagaaaatgtattcctagcttcacaaaggtttctactgctactctaacactgctttgctgccaaggtctgcagcaatgccattgccaccacgtggtactcgtgagtagttacatcactgatcaaaccctagccaaagtcttgcctcagtcaacctggaatgaaagcacatagatatctgaccaaaatgcttcacaggctgtattagtcactactgtcacaaccatcacatctaacctctacgtggccattacataaatcagaaaaagtagtggggtaattattaatagataactttcctttgggtttcccaaaggaattattttttataacttagacaaattccccagcaggtaagtggccaaatacattagggagaataaaaccaataggtttctaagacttcttgattctaattctgaagtgctccttcaattagctctagccttctacttctactatgctgctctgatctctacttttaatacagctacattactgtagaagttccctaaaagccttgtttatcatgtctttttcttccataaagacccttagtgctccatcctggccatcacagtgaaacactggctgaggcagaagaatcacttgaacccaggtggcggaagtgcagtgagctgagatcgtgccacggcactccagcctgggcaacagagcaaaactctgtctcaaaaaaaaaaagaaaagaaaaaaacccttagtggtataccactgctgatttatactttttgaacactatataattgttagtcattactgccattaggataaaattcctcaacatagcattcaaaaggccctttataccctggtattatctctcatttctcccaacacccctcacacaagttgttttcctataacacatgacaactttacgtttcctgggaattccatgactctgtacctttaccttacttgctgccactcctctttttccacttggaaaaattctcatctttcaaggcctagtttgaatgtctccttaagtccccaccaggaggagttgtgaaatatgagaagtaagggcaagtgggcagaatgtggctaattctaataagactcctgaaatgtgcagcagagcagccggaactggtctggagggaagcagagtgtatatctgacccttgtttgttcacattcattacatataaatatatatataaaaccttcccataaaacatgtgtatttaatgagttaaaactatttctaatgttcctactactacataataagcctaatccagatacaagctgaagtcttagcacaaatagtggctttatcatgctagttttgtcgacatgttgtgaatattttcaaatatacagaaaacttgaagcaactttgcaatgagtgtttatatatctactacttagaatctataattaacatttcctatatttattttatcacatacatacacacacacacacacacacacacacacacacacacacagaagtccccaccaataatccatctcctatcgggaacagatgatctctcactacttgatttacattgctaatgcattagtatacccaaatggaacacatgaccttgataggaggaagcttcccttaatcatatttgtctccctaatgcctagcagacagtaagcactcagcaagtgtttattaatgagaagataaattaataaataagtatagttaatcagtcttctgtaaaaacaaacaaaaacccagatatcaatgataccaaattaggaattctctatcatctatatactttttctcggttcagtacaaaaagggaaaaaaaaatcccacttcaatagtttttcctgcctgtgctactttagacgtaagacagcctgaaatctgacttcaacggttttgggtagatgcttagtaaaaacacgttgcaaaatgaatcctgaacaaatagacacatctctgggaataagattagaaatacagaaaaacaaggacattgtatattgaatgtcaaatataatacagtatggctaaggcagatgtaatcagaaattgcaaccttaaactttaaaacacaatggacagaattagatgatgggtatattgacagagtcccaaacccacattcaaaaaggatcataggaattgcaaagagagaaaaggcctcctaaatcttttcatcaatttagttgccatggcaatcctgaagaagtggagaatactggtgacagctcagatacagagtggggagtcatctcaaaggtttcttgacaactccaaggggcttcaggtctagagggatttgctctgtacagagaatgggcagtagaagataagccttctctaattgtagttctcatagcaatgcaagatttagattttaaaactggatatcacccagtgttggcaaggtacaggaaaatgggaactatcatataccacaggggctggaagagcataaactggtttaatctttctaaaaaacaatttagtaacatgtatcaaacaccaaaatcctagtcccagtaatttagactaaggaaataatcagggatgtaggcaaatatttagctatcaggatgccactatagtgatgtacataatagcaaactgtgcctcttaccctgaaacctccaacattcagcaataggtcaaataaatcatgatacactggaaagatagaatcccatatagtaattaaaaatgaagtcacttaagaattttaacgacccaggctgagtgcggtggctcacgcctgtaaccccagcactttgggaggccgaggtgggtggatcacttgaggccaggagtttgagaccagcctggtcaacatggagaaaccctgtctctactaaaaatacaaagttagctgggcatggtggcacatgcctgtaatcccagctactcgggaggctgaggcaggagaatcgcatgaacccgggaggcagaggatgcggtgagccaaggtcacaccactgcactccagcctgggcaacaagagtgaaactccatctcagaaaaaaaaaaaaaaaaagaaaaaagaattttaatgatccagtaaaagctagattataatgcacagaattatctggatttcttgtttttgagacagggtctcaccatatcacccaggatggagtgcagtggcaccatcatggctcaccacggcctcaacttgctgggatcaagcaatcctaccccagccactcaagtagctgagactacaggtgtgcaccactaagcctcactaatttttttttttttcccagacaggggttgcccagaacagagtgcagtagcgtgatcacaactcactgcagccttgacctccggggctcaggcaatcttcctgcctcaccctcccaaagtgctgggattacaggtgtaagccactgtgcctagcttcctggatatattttaaagataaagtatatacaagcacccctgtgcacacacaggaatactaaaagaatatacaccaataaattgctaaccatttctggataacacaaattacaattaacttatcattttaatcattttaagtgtacagttcagtggcattattttcacactgttgtgttaccattgccactatctatctccagaactttttcatcatcccaaactgaaatctgcactcatcaaacagtaactccccatttccccctccccaagtccctagtaaccactattctaccttccatcctatgaatttatcttttttttttttttaactgctccttgtggagcaaggcttatctataggcaatgtacccagagtaaccaaatgtaactattctaggtatctcatataagtggaagcatataacatgtgtcctttggtgtccggtttatttcagttaacacaatgtcttcaaggttcgtccatggatgatttttgtttatctgtattttctaagttttctatgatgcacatatataactttataagaatatcaggcttttctcaacttcatctaatctgacttcagaaagttcataaaaaaacatcattcacttactagcagctaaaagggtatttaagatttaggtgggaaaaagaagccacagcaggatgaatcgagggggtctgaacagcttcattttaagaatgtgcctacggcaggtcagagaacataagcaaactgtctaagatcacatagcccagtacagaactctcaccaatattattgccagcaactgctgtgtgtgtattctgcatagaaccctgtgctgggaatacaaagaaccaacctaattattagaagttgtcaatttagtgggagataaataaatgaaaaaaataaactgagatgagcctgaatttttgcatgagaacttggaaaattttggtgccacttctacaaataaaaattaggaggccaggcctggtggctcacgcctgtaatctcagcactttgggaggctgagacgggtggattatttgaggtcaggagttcgagacgagcctggccaacatggtgaaaccctctctctactaaaaaaatacaaaaaaatgagctgggtgtggtggcagtcacctgtaatcccagctacttagaaggctgaagcacgaaaatcacttgatcctgaacctgggagctgaaggttgcagtgagccaaaattgtgccactgcattccagcctgggtgacagagcaaaactccatctcaaaaaaaaaaattaggagaaagagcctggttctatgatgaagatgatattcatttttagacgttgtgatacagaatgttttttctagactattctgcctttagtacataaacatttcatattacattatcaaatggtcatatatatggtaaagcttttatttatttcataggtgaccaaattattggccttgaccattaggtccagaaagtaaaattgtgtactttctttttttttttttttgagatggagtttcactcttgttgcccaggctggagagcagcagcatgatctcagctcactgcaacctccgcctcctgggttcaagtgattctcctgctttagcctcccatctttcttttttttaaagaaaaaagatgatttatgagcaattaaaaaaaaaataggccaggcgtggttgcacacacctgtaatcccagcattttgggaggctgaggtgggatcacttgagcccaggattttgagaccagcctgggcaacatagtgagatgttgtctctagtaaaaacttaaaaattagctggaggtgttggtgggcgcctgtggtcccagctactcgggaagctgaggtaggaggatcgcttgagcccaggaagtcaaagctacagtgaaccatgactgcactactccattccagcctgggtaacagagtaagagaccctgtgtcaaagaaaccaaaaagaaaaaaataactagattttaaaagggaaaaaaaaaaagaagaagagaaagaagtatccacaaaacagtgaaaggctagatggtctctattaggaagagaaccctatagtctccaacttggtaccaagaataaacaccaaaattgcgattgctggcaataatattggtgagagttctgtacctggctgtgtggccttaggcagtttgcttaccttctctgacctgcagtaggcatattcttaaaatggagctatgcagagtcccttgaatcatcctgctgtggctcctttttctcacctctcttgatacagtaagtgccgtcatgtttttgctataggggaaatgatgtgtttttgtttgtttgtttttgagatggagtctcactttgtcacccaggctggagtgcagtggtacaatcccagctcagtgcaacctccgcctcccaggttcaggcgattctcctgtctcagcctccagaatagctgggattacaaggcattggccaccacgcccagctaatttttgtatttttagtagatgtggggtttcaccatgttggccaggctggtctcaaacttctgacctgaggtgatccacccaccttggcctcccaaagtgctgggattagcaaatgggtttcgaaggtttagcttattcattaaaatcagtatttagtatgctacaatgagctaggcagtgtatgtgtaggctgtgtgtgcgcgtgtgcgtgtgtgtgaaataaaaggtagtatgagttccatcaaggtgcttacagtctaatttaaggagacaatgaaccacaaacaattgtgccattaattcaaagagatgatgtcagcaaacctaagaatgtgggatacatactactgaatgcaaaggacaccacacacacgcatgtgcacacacacacacgctttttacctgagtggttaaaatgtcactctgagaggatagccctgagcagtcttcagagacgcttgtttcactctcacacccagatgctgcttcaccttaaataacaaaaacagaggttcagatgtaaaagcagactataaacgctgcaacttgctgtgtctttttcttctcattggcaggactggatttactttcatgtcacacaaaatgattaaattccttgctttgggacacctggatttgcttttataaaatgaaaccagaagtaagtccaccagtaattaggatgttaaagctcattcagtcaaagatgacgtcctagctgtgtgaaggacttttttctatgaaaagcaccttaggaggaacatgtttcaagtttaagaagcagttcctttaactatacttggaaatttgtaaaatgtgctccccaaaagcataaacatttagctcacttctataaatagactggggcaaacacaaaaacctggttccaatacctaagtttgaatccatgctttgctcttcttgattattttcttccaagcccgttcctctttcttcatcatctgaaaccaattccttgtcactcagaccaactccctggctttcagactgatgcctcatttgtttggaagaaccaatcaagaaaggatcctgggtgtttgtatttgcagtcaagtcttccaattcactgcactgtgaagaaaacaagctagcagaacattttgtttcctcactaaggtgatgttcctgagatgcctttgccaatattacctggttactgcagtcatttaagctattcttcaatgataataaattctcctctgtgttcttagacagacactcggtagcaacggtgctatgcctagtagactgagaaggtatattgtttactttaccaaataacaagtgttggaagcagggaagctcttcatcctcactagataagttctcttctgaggactctaatttcttggcccctcttcggtaaccctgagccaaatgtgtatgggtgaaagggctaggactcctgctaagctctcctttctggacgcttttgctaaaaacagcagaactttccttaatgtcattttcagcaaaactagtatcttcctttatttcaccatcatctaacaggtcatcaggtgtctcagaacaaacctgagatgcatgactacttcccataggctgttctaagttatctgaaatcagatatggagagaaatctgtattaacagtctgaactacttcttcatattcttgcttttttatttcaggatgcttacaattacttccaggaagactttgtttatagacctcaggttgcaaaacccctaatctaagcatagcattcaattttggccctctgtttctacctagttctgcttgaatgttttcatcactggaacctatttcattaatactggagcccacttcattagtactggaacctacttcattaatattgcttgagctggcttctttaaaaacattttctctaatgttattacggctaattgtgctcactgtacttggaatgttctcatttcccatttctctttcaggtgacattgaatgttcctcaaagttttcctctagcagatttttcttacatttagttttaacaaatgacttgatgggaaaaagtggtggtatacgatatgggttttgtaaaagtccatgtttatttggagtaatgagtccagtttcgttgcctctgaactgagatgatagacaaaacctagagcctcctttgatactacatttggcattatcaactggcttatctttctgaccaaccacaggaaagcctgcagtgatattaactgtctgtacaggcttgatattagactcattctttccttgattttcttccttttgttcacattcaaaagtgacttttggactttgtttctttaaggacccagagtgggcagagaatgttgcacattcctcttctgcatttcctggatttgaaaacggagcaaatgactggcgctttgaaaccttgaatgtattctgcaaatactgagcatcaagttcactttcttccatttctatgcttgtttcccgactgtggttaacttcatgtcccaatggatacttaaagccttctgtgtcatttctattatctttggaacaaccatgaattagtcccttggggttttcaaatgctgcacactgactcacacatttatttggttctgtttttgccttccctagagtgctaacttccagtaacgagatactttcctgagtgccataatcagtaccaggtaccaatgaaatactgctactctctacagatctttcagtttgcaaaaccctttctccacttaacatgagatctttggggtcttcagcattattagacactttaactgtttctagtttctcttctttttcttctcttggaaggctaggattgacaaattctttaagttcactggtatttgaacacttagtaaaagaaccaggtgcatttgttaacttcagctctgggaaagtatcgctgtcatgtcttttacttgtctgttcatttggcttgttactcttcttggctccagttgcaggttctttaccttccatgagttgtaggtttctgctgtgcctgactggcatttggttgtacttttttttctttatctcttcactgctagaacaactatcaatttgcaattcagtacaattaggtgggcttagatttctactgactactagttcaagcgcatgaatatgcctggtagaagacttcctcctcagcctattctttttaggtgcttttgaattgtggatatttaattcgagttccatattgcttatactgctgcttataggttcagctttcgttttgaaagcagattctttttcgagtgattctattgggttaggatttttctcattctgaatagaatcaccttttgttttattctcatgaccactattagtaatattcatcacttgaccattctgctccgtttggttagttccctgatttatcatttcaggagtcttttgaactgccaaatctgctttcttgataaaatcctcaggatgaaggcctgatgtaggtctccttttacgctttaatttatttgtgaggggacgctcttgtattatctgtggctcagtaacaaatgctcctataattagattttcagttacatggcttaagttggggaggcttgccttcttccgataggttttcccaaatattttgtcttcaatattactctctactgatttggagtgaactctttcacttttacatattaaagcctcatgaggatcactggccagtaagtctattttctctgaagaaccagaatattcatctacctcatttagaacgtccaatacatcagctactttggcatttgattcagactccccatcatgtgagtcatcagaacctaacagttcatcacttctggaaaaccactcattaactttctgaatgctgctatttagtgttatccaaggaacatcttcagtatctctaggattctctgagcatggcagtttctgcttattccattcttttctctcacacaggggatcagcattcagatctacctttttttctgtgctgggagtccgcctatcattacatgtttccttacttccagcccatctgttatgttggctccttgctaagccaggctgtttgcttttattacagaattcagccttttctacattcattctgtctttagtgagtaataaactgctgttctcatgctgtaatgagctggcatgagtatttgtgccacatggctccacatgcaagtttgaaacagaactaccctgatacttttctggatgcctctcagctgcacgcttctcagtggtgttcaaatcattattactgggttgatgatgttcagtatttgttacatccgtctcagaaaattcacaagcagctgaaaatatacaaaaataacaaggtactcaaaaactgaattgtcattaaaaaaatacatacttcatacaccttggaggtggaaatcaaccaactggctatattagagaaactaacctcataaactaccaagtatactgaagatgtagctcatactctttcatttaattcctatttacctagattatttccacttaggatccattaaatttttaatttcagaattttccctatgcagaaaccacacctatttctctaacgtctaagagtgaattaaaagcagattggccatcagaaaactggttctgatgtactctaaagattactggccattaagtctacttaatactctgttctatctacagacttaccactccctatatttaaaaaccagtaggtaaaagatgaaacacaaatacaccaattaaaagtaaagggcaggccaggcacagtggctcaagcctgtaactgcagcactttgggaggctgaagtgggcagactgcttgagtccaggagtttgagaccagcctcggtaacatggtgaaaccccatctctataaaaccacaaaaaattaaccgggtgtggtggcatgcgcctgtagtcccagctactcaggaggctgaagtgggaggatagcttgagccttggaggtggaggttgcagtgagccaagattgcatcactgcactccagcctgggcaacagagtgagaccccatctcaaaaaaaaacaaacaaacaaacaaaaaaaaaaacgaaagggcaacaatcagttacagaaggtcttattataggtacattagtctagtaccatttaaatctatcagaccataccacgacatttgacagagaatgatactctaactctgccaagagattttgtgggttgtaaaggtcccaaatggtcttcagaataatctaattacagtactgtatctacccactctcttttcagtgcctgttaagttggcaaactttgccattacccttttttgcagaatccaaactgatttcatccctggttccttgaggggtgatttgtaacaattcttgatctcccacactatagggaaaagacagagtcctaataagaaacactagttacatgtatgcagaactgtcaaatgaccaagatcaaacattttagctctttcgattacagaaagctgaccaatcttatttagttagtgaaagctgctctctcctttagaaacttctagttgaaatgaaatggttgctgggcacggtggctcaagcctgtaattccagcactttgggaggctgaggcgggtggaccacttgaggtcatgagttcaagaccagcctggccaacatggtgaaaccccatctctactaaaaatacaaaaattagccgggtgtggtggcgcgcgcctgtagtcccagctactagagaggctgaggcaggagtatggcttcaacctgggaggcagacgttgcggagaggtgagatcacacctctgtactccagcctgggcaacagagcaagactctgtctcaaaaaaaaaaaaaaaaaagagagaaagaaagaaatggaatggtcaattaaccgggcgtggtggtgtatacctgtagtcccagctactcgtgagattgagacaggagaatcgcttgaaccagggagttggagattgcagtgagccgagatggcgccactacactccatcctggcaacagggcaagaccccgtctccaaaaaaaaaaaaaaaaaaacctgggtcaagcaataattcctaaggaaggtaggtaacatagttggggttgcttgtagtttattatataacatacagacaaagcttgagagatatgtggaaataaggaacagaggaaagaaagagttgaaaatgaagtccttgaacattttcatcagtcacaattactgctgtgtcaatattactgtatatgaggaacttagagaacaatctgctagaagcaagcatgtgcagagttctactgttatcctaaattcctttggacagtgctaataactaaatccaacaaacaaaaagggtatttcctccactataaaatgagagaactaaactagatgatctctaaggtttcttccaataccatgattctagtctggagaaacaccagcctacttgagggaggaaggtgggaagagggagaaattcagaaagaaagcaaacaaaaaactgtggggtatgcttagtacccggatgatgaaaaaaatctatacaccaaatcccaagtcgtgtgtttacctatataacaaactgcacatacatccctgaacctaaaataaaagttaaaatatttttaaaaagagagaaacatcaatccttaatattaactaaataggaaaataccagcttcatagacaaaggttctctttgactcacctgcaataagttgccttattaacggtatcttcagaagaatcagatcctaaaaaatttccccccaaaaaataaatcaataaaagttttcttaattaaaagggttaaaaaaatgtacttgttgaaaaacagatattcaactagaaatatttactgagcatctactgtggcaggtacaatgctagttaagctagtatgtaatacagagaagtggttaaaggcatgggcttcgccaggcacagtggctctcacctgtaatcccagcacttgaggaggccgagatgggtggattatttgaggttaggagttcaagaccagcctggccaacaaagtgagacccccgtttctactgaaaacaaaaacaaaaacaaaaaaaaagcacaggctctgacatctaacttcctaggtttgaatcatggctcagccacttactaggtttaataccttggaaaaatttcataacttctctgtgccttaattttctcatctgtaaaataagtataataggaacaatctcagaggtctgacaagcatctaatgagttatacaagaaaagcacaatagtgcctggaatatagttaagtgctcctaaatatcaactactataactatttttacaatgcctgttgtctaggaatttatgatcataaggggggaaaacagtaagtgttatgataaatagatggtggtgcctgggagctcaaaagatggctatcctttttaattataaatatattctaaaagaaaatccaatttgagagcccagtttgaattctgagctcagcagctcttttttttttttttttggaggtcttgctctgtcacccaggttggagtgcagtggcatgatcatagctcactacagcctcaaactcctgggttcaatgtatccactcacctctgcctcctgagtagctgggactacagatgcacaccaccacacccagctaatttaaaaaagaaatttttttgtagagatgaggtcttgctatgttgcccaggctggtctcaaactcctggcttcaagcaatcctctgccactgctgagattacagatgtgagctactatgctggcctcaacttttctttttataagcttaaaaaaatttattatttttaaaaattattatttttttgagatgcagtctcactctattgcccaggctggagtgcagtggtgtagtgttggctcattgtaacctccgcctccctggttcaagcgattctcctgcctcagcctcccaagtagctgggattacaagcatgtgctaccacacccagctaatttttttttttttttgtatttttagtaaagaggggtttcaccaggttatccaggctggtctcgaactctgacctcaggtgatctacctgcctcagcctcccaaagtattgggattacaggcatgagccaccgcaccggccaaaaatgtattattattttaaaaatagagacagggttcccctatgttggccaggctggtcttaaactcgtggactcaaccaatccttctgcctcggtcttccaaagcgttaggattacaggcacgagccatcctgcccagccaagattcagctctttttttttttttttgagatggagtttcactcttgttgcctaggctggagtgcaatggtgcgatcttggctcactgcaacctctgcttcctgggttcaagcgattctcctgcctcagcctcctgagtagctgggattacaggcataagccaccaccccggctaatttttttttttttttttttagtagagatggggtttctccatgttggtcaggctggtcttgaactcccgacctcaggtgatccgcccacctcggcctcccaaagtgctgggattacaggcgtgagccactgcgcctggcaattcagctcttcttaaaaggcttcctcatctagtacaatttatcttggaactaaatactgtagcaatccatcatgttttttcttattgctactctccatctttccaaaacatatttacacatatttaaaaccagatattctttcttttgctctcttttttttttttagatggagtttcgctatttttgcccaggctggagtgcaatggtgcgatctcggttcaccgcaacctccacctcccgggttcaagtgattctcctgcctcagcctcccgagtagctgggattacagttatgtgccaccacacctggctaattttttattttttggtacagacagagtttctccatgttggctaggctggtctcgaactcccgacctcaggtgatccacccactttggcctcccaaagtgctgggattacaggtgtgagccaccatgcctggcctcttttgctccctttttaaagtaagattcttcaaggtgggaactgcgtcttttacattttttataactcaccatagggctcataaaattcacttcccaaagctgcctaccacaaatacaaattatgaccaagatttttggcaaaactataagataaggaatccagcaattattattaaatacttaaaaaacctgagacccttacccaattcaatgtagacagacgtcttttgaggttgtatccgctgctttgtcctcagagttctcacagttccaaggttagagagttggacactgagactggtttcctgctaaacagtatggtaaagaacagtcaagcaattgttggccagttctgtgcttttcctcctgaagagaaacttgacaccatggacaaaataaattgaccatcatcagtcagctaacatgtatgatgcctggaaaaaatgcccaggaatttacacactaaaatgtctggggctgggagcggtagctcatgcctataatcccagcactttgggaggctggagcaggactgcttgaggccaggagttcaagaccagcataagcaacagagtgagacccagtctctacaaaataatagtagtagtaataataaaatgtgtgggatatgtgtgatttgaatttttttttctgttgtcttaaatttttcaaacctgattatgtattatttgtgtaatttttgaagtattaatatagcatattttgaagctgatacttgatatacattccaatcacatctgataacttttttttttgttttggggggtgtacagagtcctgctctgtcacccaggctggagtgcagtggcgcaatctcagctcactgcaacctccgcctcctaagttcaagagattctcctgcctcagcctcctgagtagctgggtctacaagcgtgtgcaactatgcctggctaatttgtgtgtgtgtgtgtatatatatatacatatatatgtgtgtgtgtgtgtatatatatatataacatatatataacatatatatattatatatatataacatatatataacatatatatatgttatatatatataacatatatataacatatatatatatatatatataatatatatatatatatatatatatgtaatcccagcactttgggatatatgtgtatatatgttttttttttttgagacagaatcttgctctgttgccaggctagagtgcagtggcgtgatctcggcacactgcaacctccacctccctggttcagttgattctcctgcctcagcctcccgagtagctgggactacaggcgtacaccaccacgcctagttaatttttgtatttttagtagagacaggtttcgccatgttggccaggctggtctcacactcctgacctcaggtgatctgcctgcctcggcctcccaaagtgctgggattacagccatgagccaccgtgcctggccaataacatttttaaaaaggataaatgatgacaataaaaccccagcactcctaagaacatttagtataggaacgagtatttaaaagcccaacattactttttttttccttcctttttagctctatatcttttgaaaaatgaatgctggtactgtgagaactacttttattttatttgtatttttttagacagagtcttgttctgttgcccaggctggagcgtggtggcgtgatctcggttcactgcaacctctgtctcctgggttcaagtgatcctcccacctcagcctcccaaggagctgggactacatgcgcacgccaccatgcctggctaatttttgtattttttgtagcgatggggtttcaccacattgcctaggctggtcttgaactctaggactcgagatccacccgccttggcctcccaaagtgctgggattacaggcaagagccactgcgcccagctagaacaattacttttttttcttttttgagacagagtctcactctacggcccaggctggagtgcagtggcgcgatcttggctcgctgcaacctccgcgtcctaggttcaagcaattcttgtgcctccgcctcccgagtagctgggattacaggtacgtgccaccacacccagctaatttttgtatttttagtagagatgggtttcaccatgttggccaggctggtctcaaactcctgacctcaaattatctgcctgcctcagcctcccgaagtgctgggattacaggtgcaagctactacgcccagccccagaatgattactttttaagatctccatcattcatgcacatataagtaacaacagagcaaatcactacattttctttaacaattacaccttttaagttcaagtaattttccctttttttaaaagatagggtctcagtcacctgcgctggagtccagtggcacagtcatagctcaactgcagccttgactctctatgttaaagcaatgctccagcctcagcctcccaagtagctaggaccacaggtgcataccaccacgcccagctaagtttttttgttttttttttgagacagagtctcactctgtcgcccaggctggatcgcagtggcgggatctcggctcactgcaagctccacctcccgggttcatgctattctcctgcctcagcctcccgagtagctgggactacaggagtccgccatcacgctcagctaatttttctgtgtttttagtagagacgggctttcaccatgtgagccaggatagtcttgatctccacacctcgtgatccacttgactcggcctcccaaagtgctgggattacaggcgtgaagcttttttttttttttttttgagacggagtctcgctctgtcgccaggctggagtgcagtggcgcaatctcggctcactgcaacctccgactctcaggttcaagtgattctccatcctcagcctctggagtagctgggattacaggcacgtgccaccacacccagctaatttttgtatttttagtagagaccgggtttcaccatgttggccagggtggtctcaatctcctgacctcatgatccactggcctcagcctcccaaggtgctgggattgcaggtgttagccgccgcacccagccagttctttttttttttgcaactagatcttgctttgccgcccacgctgaagtgcagtggagtgatcatagctcactgtagtctacatctcctggactcaagtgatccttctgtctcagcttcccaagtagctgggactacaggcacacaccaccatgcccagataatttaaaaaaacttttaatatagacaaggacttgctatgttgcccaaactggtcttgaactcctgagctcaggcaatcctcaagcctcctagtgctggaattacaggcgtgagccacggcacccagctacttttttttttttttaattgcagagacagtgtctcactgtgttgcccaagctgggctcaaaggacctcctacctcagcctcccaaagggttgggattataggcatgagccatggcacccagctgaagtaatttccaaatgcttaaaaatatcagtgaccttatggctattttagataagcatcacagagcagataaagctccaaagcaaggaagggcctataagagctctcttttttggccgggcttggtggctcacgcctgtaatcccagcactctgggaggccaaggagggtggatcacctgaggtcaggagttcgagaccagcctgaccaatatggtgaaaccccgactctactaaaattacaaaaattagccaggtctggtgtcgtacccctgtagtcccaactactcaggaggctgaggcaggagaatcacttgaacctgggaggcggaggttgcagtgagctgacatcgtgtcactgcgctccagcctgggcgacagagcgagactctgtctcaaaaaaaaaaaaaaaaaagaaatctgtctttttggtgtatctgatggggatcttgctatgttgcctgggctggtctcaaacctggactcaagtgatcctcccatttcagcctcctaagtagctgggattataggtacattcacctcacctggctgtaaggtctctctcttgattatatcaggtaccctgaccttctctgaactctaactgattagaacacttgtctaaccacttaatataccatctttccttcttcactaactttttatataaatctatgagcatctagcacattcactaacatattcacaatgctcaataaagagatgttgccagaataaatgaaaatggttttaccggccgggcacagtggctcacacctgtaatcccagcaatttggggagccgaggtgggtggatcacctgaggttaggagttcgagaccagcctggccaacatgatgaaaccccgtctctactaaaaatacaaaaattagcctggcatggtggcgcgtgcctgtaatcccagctactaagggggctaaggcaggaggactgcttctagcctgggccacagagcaagactccatctcaaaaaaaaaaaagaaaaaaaaaagaaaagaagaagaagaagaagaagaaaacaaatggttttaccaaggaaggattttcgggttcactctgtagaagtcttttggcacggtttctgtagcccatactttggatgatagaaacttcatcttttagatgttcaggagagttattttccttttttgcaaaattatagctgtttgcatctgtaaaatacaagggaaaacattatgtttgcagttagagaaaaatgtatgaattataatcaaagaaaccaagagaaaccctatgtatgctctttgttgtgttaagacaatgcattaaggttacctgtgattttttttaaaaatcaaattttaaaaaatcaactggaaattttactcctaggaaacaaaaacaaatacacagaccatcaaagttatttagagtccttgttttctaccttaacactaagaaatttgcctatcaatactgtatttcactaaagctaagacaccaacaatgtaagttgcactattattttctgtatcactaagaaagaaagcacacaaattaaacaaatgacacaccctcaatagtaaaatgttcccaatttcagagatgttaagatgtgaaaaatgtgcaccttacgattgataaaataaggtgtgagaccagtgggagtaattttttaaaaatagattacagatacagaactaaaattaacctagactaaaaggtcttatcaccacgtcatagaaagtaattgtgcaaacttcctgagttttcatggacagcacttgagtgtcattcttgggatattcaacacttacactccaaacctgtgtcaagctgaaaagcacaaatgattttcaatagctcttcaacaagttgactaaatctcgtactttcttgtaggctcctgaaattaaattgtttgagaaacacactcagcaagtgattatcaaccttttaaggacactaaaataagaaaagacatgtaaacaaataaaaataagatgcagcaacagtagaaaacctctataatcaatacatcattgacatctgtataaaccgtgtgatggcagtgatttagtaactttttgtcattcatttaagcctaccaaatgcctaaaattatctgatataatactgccctaaatccacagcagatataatgcattgcatagaaaactagagtacttttttttttgtttaatttagagacagggtcttgctctattgcccaggctagcatgcagtgccacaatcatagctcactgcagcctcagacttctgtactcaagctatcctcccactatagcctcccaagtagctaggactatgggcatatgccaccatgtacatttatttatttattttgttggtagtgatggggtctcactatgttgcccaggctgatttcaaactcctggcctcaagcaatcatcccacctcagcctcctagagtgctagggttataggcatgagcaatcacaccctgctgagcttactgttcttaacatctgaaccctgcccaatccctcacttagttctgcctctcaaggatttctgtcaaattatgattatacttctttgaaaacacatagataacaatgtccaaagggagatttgggtttagtaaagtggaattaaagcacaattcattcattcctttaagcatctgagtgcctactatgtaccaaacttaggaaaaacagtgttgagacagacaaaattactactctcatagaatttacattgtagcagaagagatacacaatatataaatacattgtgtttgtgtaaataattagatagaaataaacacacacctgtgaaccccagcactttgggaggccgaggtgggcagatcacctgagctcaggagttaccagcctgggcaacatggtaaaacctcatctctacaaaaaatacaaaaattggccgggcatggtagcgtgtgcctgtagtcccagctatttgggaggctaaggcaggaagaggctgggagacagaggctacagtgagccgagatcacgccactgcactccagcctcagtgacagagcaggaccctgtcttaaaaaaaaaaaaaaaaagaaaaggaaacacaatcaaaaatataaaaacaagattaacagacaatgggggcacggcgatacagccctactttacataagtctgcaagtttttacactagaagcattagagaaaggcagtaagtttctaatacctgtataaggcagatgtcccataaaactttcaggaaaataactttggaaataatttactgtgtgctaaaaactcttttataaatttttctgatgaatggttttataggaacgctatgttattaaataatttctactttttcctactgtggttgcttccaacctagcatcattaccaaattatataccttttggttatatcattcttacataaaggacactgtgaaggccctttcttctggttgagaagtttcagcatgcaaaatctataaattataaagaaagaaagaacaatttaatttacttccttttgtagaaagaatactcaaaaggcaaatagccatgaaaagataatctcacaactgcccttaagagccatttaaaaagtaatggcaggtgaattacaagcaatagtttcctaattgtttttggatgctgcataagcaaaaacctaaactacataagcaatgatctatgaaaactgaacttacatgcatatggcttactgttatgatcacataaaacttaataaaagttaatatggcatatttaatgatatattcataattatttcatgctgcataatcaaatataaacggtaagtagttcatgtaagatgcttataattagtttaaaatctcaacacctcaccacaaagctatagtaatcaagaaagtgtggtaatagcataagaatagacacatacatcaataaaatggaattgacagtacagaaataaactcatacatacatctgtgatcaagcgattttcaacaataataaataccaagacaattttttttttttttttttttgagacggagtctcgctctgtctcccaggctggagtgcagtggcacgatctcggctcactgcaagctccacctcctgggttcacgccattctcctgcctcagcctcccgagcagctgggactacaggcgcccagcaccatgcccggctaatttttttatttttagtagagacggggtttcaccatgttagccaggatggtctccatctcctgacctcgtgatctgcccgcctctgcctcccaaagtgctgggattacaggtgtgagccaccatgcctggccgacgatttttattttcttaattttttttttttttttttgagacagactcactctatcacccaggctggagggtagtgacacaatctcagctcactacaacctccacctcctaggctcaagcaattctcgtgcctcagcctcccgagtagctgggattacagacatgcaccaccatacccagctaattttttgtatttttagtttcaccatgttggctagtcttgaactcctggcctcaaattgatccatctgccttggccttccagagtgctgggattacaggcatgagccaccgtgcccaggccaaagatgattaaatgggaaaataatactttttgtgtttttaacaaacagtgttgagacaaaagtataaccacatgtaaaagaatgaaattatactcctatctcacaccaaataacaaaagttaactcaaagtggatcatagaccagaagtagagagagcaatggtgatgataattaaaagcagcgattcactcatacaaccaatatttactatgtctagtactattctagatggaggggattcaatagaaaagcaaaataagatcctgcaaaataaaacataaaggacataatatactggtgaagggggtgactaggtagggagtaaatagcagacactgacaatgaagagacccaggaaagaaaagattaaggggctaaaaaaaaagtcactagggctgtgcacggtggtccacacctgtaatcccagcacttgcggggtgggtgaatcacttgaggccaggagttcaagaccagcctggccaacatggtgaaaccctgtctctactaaatattcaaaaattagctgggtgtggtggtggtgcactgtagtcccagttactcgggaggctgaggcatgagaataagttgaacctgtgaggcgggggttacagtgagccaatattgcaccattgcattccagcctgggcaacagagtgagattgtgccaaaaaaaaaaaaaaggcattgggaattgtgagaaaagacacttagagaatattttttactagccaggtaatttaacatttattaccctctcttggccgggtgcagtggctcatgtctgcaatcccaggaggctgaggcaggcagatcacttgaggcctggagtttgagaccagcctggctaacatggtgaaaccctgtctctactaaaaatacaacaaaattagccaggcgtggtgggcacacgcctgagtcccagctacttgggaggctgaggcatgagaatcactggaacccaggatggcagaggttgcaatgagctgagaagagtgccactgcactccaccctgggcaacagaggaagactctgtctcaaaaaaaaaaaaaaaaaaaaaaaaaaggccaggagcggtggctcacgcctgtaatcccaacactttgggagaggtcaggagttcaagaccagcctgaccaacacggagaaaccctgtctctactaaaaatacaaaaattagccgggcatggtggcatatgcctgtaatcctggctactcaggaggctgaggcaggagaatctcttgaacccgggaggcggaggttgcagtaaactgagatcgcgccattgcactccagcctgggcaacaagagcgaaactccatctcaaaaacaaaacaaaacaaaacaaaaaaaccccaactatatctatatctctatctatctacctacctatctatctgtctacagtcttgaactcccgacctcaagtgatcgcctgcttcagcctcccaaagtgctgggattacaggtgtgagccattgcgctgggctactttctatctttatttttgtacagatgtggtttcactatattgcccagtctggtctcgaactcctgacctcaagtgatcctcctgccttggcatcccaacgtgctgggattacaggcatgagccatcaagcctggccttatcttcatttttatagagtagaggcttgtcccagatcacacagtaattaagcaatgaaggttatattggatccagaattggattgtagcaaagcccacaatcttccttttttcttttttgacatggaaactaagtctggagagaggcacccacaatcttcctaccagagaaagtgaatgtaggtaggtaaggtcaaggagacttgggtccttcttcgccgatatagatgcttcaagtaccatattgcactcaacaaaacaatgactctatagtttggaagatgaggctgtcaaaaagctacctccactgtacataagtacctttaaaactcagaatagaggctcccactccttcagaatctacaaatactacatatactctagtataatggatcaagaaggcatcaagcattactccagcaaatagtacaattgaacaattcagagcaggggtagggaggaaattcccttatgatagtactgcagaatatagtacagtagagtgacaagctaagctgtctcgtgctgtagtctatacaattatataaataattcagtggaactagatacgcaaaaatcaaccaagataaggattcgaatctttttttttttttttagacggagtctcgctctgtctctcaggctggagtgcagtggcacaatctctgctcactgcaagctctgcctcctgggttcacgccattctcctgcctcagcctcctgagtagctgggactacaggtgcccgctaccacgcctggctaactttttgtaattttagtagaggcggggtttcaccatgttagccaggatggtctcgatctcctgacctcgtgatgtgcccatctcagcctcccaaagtgctgggattacaggcgtgagccaccgcacccggcctcgaatctttctttatgctagaaaaagaatacatgtataaaggttgttaactaaacttaaaagaaaatgaacttgtatatgacttgaaaagacagagctaactaaaatactggccaggcatgatgactcacacctgtaatcctagcactttgggatgcctaggtgggcagacgggttaagcccaaagttcaagaccagcctgggaaacatggcgaaaccccgtctctacagaaaacacaaaatttagctggatatggtggtgtgcacttacagtcccagctacttgggagactgaggtgataggatcgcttgagcctaggaggtcaaggcaacagtaagcctcatgatcgcaccactgtactccagctgggacaacagagtaagaccctgtctcaaaaaaaaaaaaaaaaagtagctgttgaaaaatttaagttacatttattgctcacattctatctctttgaacaatgtggttctagatcttcaaaaaagtattacaggctgggtgcggtggctcatgcctataatcccaccattttgggaggtggaggtgggcggatcacttgaggtcagctcaagaccagcttggtcaacatggtgaaacatggtctctactaaaataaaaggctgggcgtggtggctaatgcctgtaatctcagcactttgggaggctgaggtgggcggatcacctgaggtcaggagttcgagatcagccttgtcaacatggtgaaaccctgtctctactaaaaatacaaaaattagccatgcatggtggtgcacgcctgtaatcccagctacttgggaggctgaggcaggagaatcacttgaaccagagaggcagaggctgcagtgagccgagattgtaccactgcactccagcctgggcaacagaacaagactccatctcaaaaaaaaaaaaaaaagtattacacattgcatttttttgtttggaaagttcaaactaatgcatgactgccttaagaaatattttctagattggtattattatctttttttataggcttcataaaagatttcagaactggctgggcaaggtggctcatgcctgtaatcctggcactgtgggaggccaaggcgagcagatcacctgaggtcaggagttttggaccagcctggccaacatagtgaaaccccgtctctactaaaaatacaaaaattagccaggtgtggtggcacatgcctgtagtcccagctactcgggaggctgaggcaggagatttgcttgaacccaggagatggaggtggcagtgagctgagatcatgccactgcactccagtctgggcaacacagtgagactccgtctcaaaacaaaacaaaaaaaaacagccgggcgtggtggctcacacttgtaatcccagaacttagggaggccaaggcgggcagatcacgaggtcaggagatcgagaccatcctggctaacacggtgaaaccctttctctactaaaaatacaaaaaaattagctgggcgtggtggcaggcgtctgtagtcccagctacttgggaggctgaggcaggagaatggtgtgaacccgggaggtggagcttgcagtgagccgagactgcaccaccgcactccagcctgggcgacagagcgagactccgtctcaaaacaaaacaaacaaaaacaaacaaacaaacaaacaaaaataaaaaaaagatttcagaactttaggcttgcttgggtcaataaagttgttttatttttagcaattagagtttatccgtagaaaatacaattaatacaacaaaagcatgggggtatcgctcccaggctcccagctttctcatcatatagatcaaagtgttattcagattatattgatattacagaagagatttcatgaaaaagtcgatctatcacatgggcattatactggactttttttttttttgagacggaatcttgctctgtcgcccaggctagagtacagtggcacgatctcaactcactgcagcctctgcctcctgggttcaagaggttcctctgcctcagcctcctgagtagctgggactacaggcatgtgcccccatacccagctaatttttgtatttttagtagagatggtgttaccatattggccaggctggtctcgaactcctgacctcgtgatccgcccacctcagcctcccaaagtgctgggattacaggcgtgagccaccacacccggctttggacttttaattctaatataacattcaaaacacaatttaaaatatggctggcccatctctacaagaaacttaaaaattagctgggcaaatgccatgtacctgtagtcctagctacttgaggggctgagatgagagattgcttgaacccagattgcaaggtaaaagtgaactatgatcacaccactgaactccagcctgggtgtcagagggagacactgtctcaaagaaacaaacaaaaatatatatgtgtcacacacacacatatatataacatatttatatgtatacacacacatatatctttatgactggttctttcctgactatcacaatcctgactatcacaagcttgaaaccaagcttctcactcttctccagttgccaactctaatcctctcaatctcaacagctgttttttgttgttttttttttttgagacagttttcactcttgtcgcccaggctggagtgcaatggcgcaatctcggctcactgcaacctccgcctcccaggttcaagtgattctcctgcctcagcctcccaagtaactgggattacaggcatgcgcctccacgcccgtctaattttgtatttttagtagagatggggtttctctatgttggtcaggctggtcttgagctcctgacctcaggtgatccacctgccttgggctccaaaagtgctaggattagaggcgtgagccaccgtgcccggcctcaacagctgtctttacctccaacttcactgggctcaaagcacctcagcatcttcctgtagaattactctccttttccttcattactgtttatgagtaataatcaactctttcttacatcctttttctatttccaatcccttctgcctcctcttggaccttctctttcttgcaaatggcttcccatctttgagggcttcttccttttctaacacaactcctatacacatatgcaaagttagcttatttttcctggatgtattttcttttcttttcttttttttcagacagagtctcactctgttgtcaggctggagtgcattggcatgatctcggctcagggcaacctctgcctcccaggttcaagtgatacccctgccgcagcctaccaagtagctgggactacaggtacgtgccaccatgccaggctagttttttgtgtgttttagtagagacagtgtttcgccattttggccaggatggtcttaatttcctgacctcgtgatccgcccacctcgacctcccaaagtgctggtattataggcgtgagccaccgcgcccgtcctctattttcttttatttgtacatttgctcgtattattatctctgcctataagcctataatttccttcttccacaagttctcaaagcaactatattcataacttaatctctctttttttgttaagagacagggtcagccaggcgcggtggcttacacctgtaatcccaacactttttaaggccaaggtagctgaagtcaggagtttgagagcagcctggccaacatggtgaaaaccctgtctcgactaaaaatacaaaaattagctgggtgtggtggcagatgcctgtaatcccagctactcaagaggctgaggcaggagaatcgcttgaacccaggaggtggaggttgcagtgagccgagatcacaccactgcactccagcctgggcaatagagtgaaacaccatctcaaaaaaaaaaaaagacagggtctcactctgtcatctaggctggagtgcagtggtgtgatcatagctcactacagcttcgaactcctggccttaagtgatcttcctgccttggcctcccaaagtgctggggttatgggcaggagctaccacactgggcccttgagtccctgtaataatagtatagtatgttcagcatttgttactcaagctgacaagaaaacatacagttcattccagaaagattctcatccagataaattgaaagccccagggctttaaaggttaatctttagctctctgtagtaaatactgggacttttttttttttttttgagtctccctcttgtcgcccaggctggaatgcagtggcatgatcttagctcactcagatgaaaattatggactatcttcccagaaaaatgtacatggccatagttttgaatacaatttaaatataattctaggaaattcataaagactattcataaaccccaagttaagaactctggaatttaaaaattcctcaaaggatacataagaaattgatcattgtggttgtctggggagggaacagggaggcaggggttgtagggtaagagggaagtatactttgcatcatatacctttttgtgctaataaactttttaccaagtacatagtttgtacctggtaccaggttatgtaccaggtacataaatacttaaaaacaaattagttgacatttaaggtaagatgtgagccatagcttaacataaagaaaaggagaaagcccacttgttctactaaattacctactctactttttctgaaattcttttattaagaaacaaacattttcatttcaaaagacaagatcatcaaatacgtaaatataacttgaatcactgctataaatgaattttggcctaaatagaaactggtatcaggtcctttcctgtcttcacaatgattacaaagcgggcaaacactgacccttagaagggggaatgcataaggatatgcagaaatgaacagaaaggagaaactgggaaggctcaaacacaatgtgcttatttcaaaactgcttgcagtttgctttcactgatggacacaaaaaatacaaaacactgttcaaaatgatgttacatcctaatagataatatatgtcagtcgggtgtggtggctcacgcctgtaatcccagaactttgggaggccgaggcaggtggatcacaaggtcaggagttcgagaccagcctggccaatatggtgaaaccttatctctactaaaagtacaaaaattagccaagcatggtggcgggtgcctgtagtcccagctacctgggaggctgaggtagaagaatcgcttgaactcggggggcggaggttgcagtgagccaagatcatgccactgcactccagcctgggcgacagagcgagactttgtctcaaaaaaaaaaaaaaagataatatatgtcaaaactttaccaggaactatgattacaaccaacttttgataactatatactctctgagaaagaatgaaatggagttggatttttcgttctcacttaattgaagaaagtaaagcttctataaagttaggtgtttcctgggttatgaaggacaaaaacaaaagctaataatggagccacataacacattcaaacttacttgcaaaatatgtggtcacactttgtggagacaggttccttgatcaactccagactagcagggtagggggggagaaaaagaaaataaatgaggctcaataatttatttaaaaataaagctattcttagtgaataagttcaactttgagctgttatgactgagtcaacataaggcctcaagttcgttcaatatttattaaatgtctgctgtgtcaggaactgagaatacagcagagaatacgatccttaccttcagtgagctttcagatatcaaaacagaattatattgatcccttcaatactctatactatcatcagcatttaaaagattagttgataatagttcgtacgaattcatttccagtgatatatttttctgcactatcactgtgggtgcacatctcatctttaagctccataaagacaaaattttctgcttatatttcttttgaattccttcctagaacttttttttgtttactgtaaatgcctttttaacttaatatggaaaatttcaagtatttcaaaatttcaagtaaataaaataataaaatgaactatatggaccatcaccctggtccaacaaccatcaactcatggccaagctgtttcacccatatccacccctaccccagattattttaattattattacttttaagataaggtcacactctgtcacctaggctggagtgcagtggtgcaaacatacctcactgcagccttgaactcctgggctcaagcaatcctcccagcacggggtttacaggcatgagccaacacacccaaacccaagtgtcttcttttttttgagatggggttttgcttttgtagcccagactggcatgcaatggtgcgatctcggctcactgcaacctctgcctcccaagttcaagtgattctcctgcctcagcctcccaggtagttggaactacaggcgtgcgccaccacgcccggctgatttttcgtatttttagtagagttggggtttcaccatgttggccggctggtcttgaactcctgacctcaggtgatccgcctgccttggcctcccaaagtgctgggattacaggtgtgagccaccatgcccagccccaagtgtcttctgatctataggtgtctcttactttttctcccttgtcatttatttttaaaattaggtcatttgacctgtggagtttcccccattctggattttgctgattgtataaccctatggtgaggtttaacttgttcctctagccttatttcctataaactagacttacaggcttaatcattcaggttcaactttctggcaagaacactttacagatggtactgtgtactcttattagatcacttcagaagaggcatgatgtttggtttgtgattactttgtaaaaacagtgtaataagtactcactaaaggaaatttagaaaatgataagcttaaggccgggcatggtgcctcatgcctgtaatcctagcactttgggaggctgaggtgggtggatcacctgagctcaggagttccagatcatcctggacaatatggtgaaaccctgtctacgctaaaaatacaaaaattagccgggcgtggtggcgcatgcctgtggtctcagctactttggagactaaggtagaaggatcacttgaatcctggaggtggaggttgcagagtgagccaatatcgtgccactgcactccagcctaggtgacagaggaagactctgtctcaaaaaaaagaaaataaggccagacacgggggctcatgcttgtaatcccagcacttgggaggccgaggcgggcggatcatgaggtcaggatttcgagaccagcctggccaacacagtgaaacgctgtctctactaaaaataccaaaactaactgggcatggtggcatgcgcctgtaatcccagctacttgggaggctaaggcaggagaatcgcttgaaccggggaagtgcacgttgcagtgagccaagatcgcgccactgtactccaacctgggcgacagagctggactccatctcaaaataataataagcttaaaaataaaaacttcagaaaatacatcacccaagttcccatccctacctgtctatccacaaaaccaaggcattcctgagattagttcatttattatactaatataacaagtgtttattaagtatctactactatattcaagtactattctaggagatagaaatgtagcagtttacaaaataaagcctgctctcatagagctcatattctagtgtggtagacagttgatacggaattaaagaatacatgggaataagtgcattaaagagaaaaattaagcagggtaaggggaaacaggtagttcaatatctatgtgggggtgagatgtacatggggggagtcaggaaaggtttcactgaggtgagactagaggatagcttaataatgtaaagaaacacactatgcaacaattaggggaagagcattccaagaaagagggagcagagaaggcaaaccctgagcaggaccatgcctgtgtatgcaggacatcagataggtcaaggtgctaaaatgtaataatccaggaggatattgtagggaaagactatcagagaggtagctggtaacttctggtaggaacctataggctattttaaatctttagctttattctggtctttttaattttctttttttttttcagacagagtctcgttctgtcgcccaggctggagtgcagtggcaccatctcggctctctgtaacctccgcctcctgaattcaagtgattctcctgcctcagcctcccgagtagctgggactaaaggcatgcaccaccatgccttggcctcccaaagtactgggattacaggagtgagccaccatgccagccatctttttaatttttaatgttaattaatttttgtagagacaggatctcactatgatgcccatgctggtcttgaatgcctggcatcaagcaatcttcctgcttcggcttcccaaagtgctgggattacaggtgtgagctactatacccggcctttagctttcttctgaatgtgaacctttttttttttttttggagatggagtctcactcactctgctgctcaggctggagtgcagtggtgtggtcttggctcactgcaacctctgcctctcggattgaagtgattcttgtgcctcagcattccaagtagctgggactacaggcgcgtgctgccacacccggctaatttttttgtatttttggtagggaaggggtttcaccatattgcccaggctggtcttgaagtcctgacctcaagtgatccatctgcctcgaccgggattacaggcgtgagccactacacttagctctaaatgtgaatttttgaaacggattttttggataaagtccaggcaagatatcaaagaacgactaacctggcagtgtgacaagaatgtggttttttccttaaatatttaactttttagaaaaggatcacaagggccaggtgcggtggctcacgctgtaatcccagcattttgggaggccaaggcgggccagcctgggtgacagagaatccatctcaaaaaaagaaaaaaaaaaaagaaaaggatcacaagaaaagcttgtggacagtaaccttattgtgaagggttgtaatacaactcttgtaatcatggggtttttgacatagcacagggcagtgaaaagaaaaacaatgaactaagtcaggaggctgggtttctactaccagttgtgtatataagcagagccaccttgggctaaccactctacctgaacctgtttccttctcttgccattcaccctgccagactccttgggctattgcaagaataaaattaaatgctacttgggaaaatgcttcacaacctgagatgacttgggaaaaatgcttcacaacctgagataacttgtaccaacattggtattattactgggaccaaatgtgactttaaaaagaaaaacaaccttgacaaagaaaactctgattggttactaaatccctatttctgagataagctacatttcaaagaaattctccgtaaaagaaaaattggattcagttatcataccagatggctttcattctcaccactgactcaattctgaaacaattatatttcagtatggtaattataatctaaactatataaacacactgtaaacacaaactttgaacagatgaaaactccgatatgtaaaaaggtaatgaatgttgaaggaagactgtgaaaagggaaaagaaaaaaaattaaaatgttccccttctaggtcctgatgagagtaaatgtttactataaaaatgattcaaatattttaaacacttttcaaaccaggcaatattttaggcctactgtatatttgcattttgagcttccaatacggataagtgactggaaaaagcagctaggtttaggttgaaaaacaacaacccaccggggaacacattttagcaaattcttctgaaagtcaaaaatgttatagtcataggtaaaaagttacaaagaactaccaattgtcagaaatagctgccaatattgacttagaagacagcagaaggaattttagttcaagaaacctaaaacaggctgaaaaccttacctaccctatagctaccacaaataacactgtttccagtcatgatcattcctgatcacatattaagacataactgcaaattgtgctatactgtactatattaaaaggaagtgaaatatgatccctatcctagaactttccatacaaatgaatgtaaaacaccataaaaattaatcttaaggccgggcgcggtggctcacgcctgtaatcccagcactttgggaggccgaggtgggcggatcacgaggtcaggaagtggagaccatcctggctaacacggtgaaaccccgtctctactaaaaatacaaaaaattagccgggcgtggtggtggacgcctgtagtcccagctacttggggggccgaggcaggagaatggcgtgaacccgggaggcggagcttgcagtgagccgagatggcgccactgcactccggcctgggtgaaagagcgagactccgtctcaaaaacaaaacaaacaaaaattaatcttaagccaggcgcagtggctcacgccagcactttggaaggccgaggcgggtggatcacgagatcaggacttcaagaccagcctgaccaacgtgatgaaaccctatctctactaaaaatacaaaattagccggccacggtggcgtgcgcctataatcccagctactcaggaggctgaggcaggagaagcgcttgaacttgaacctggcaggcggaggttgcagtgagccaagatggcgccactgcactccagcctgggcgacagagccagactccaaccccccaccccgaaaaaaaaaggtccaggccgggcgcagtggctcaggactgtaatcccagcactttggaaggctgaggcgggtggatcacaaggtcaggagatcgagaccatcttggctaacatggtgaaaccccgtctctactaaaaatacaaaaaattagccgggcatagtggtgggcgcctgtagtcccagctactcgggaggctgaggcaggagaatggcctgaacccgggaggcggagctggcagtgagccaagatcgtgccactgcactccagcctaggcagcagagcgagaccgtgtctcaaaaaaacaaaacaaaacaaaacaaaaagtctgggagcggtggctcacgcctgtaatcccagcactttcggaggccaaggcaggaggatcacctgaggtcaggagttcgagaccaacctgaccaatatggagaaaccctgtctctactaaaaatacaaaattagctggtgtgatggcacatgcctgcaatcccaggtactccggaggctgaggcagcagaattgcttgaacccgggaggtggaggttgtagtgagccgagattgtgccactgcactccagcctgggcaacaagagccaaagtctgtctcaaaaaaaaaaaaaaaaaaaaaaaaagaaattaatcttaacaggaaacagaaaaaagcaatgaaaagctagaaaacataatagttgattgaaaataacaatttagcattttcattcttacatctttaatttttatgtatctgagtttttaattgatggtttaatttgccagaatgagaaagaacatcctatttttatgactctctcccatggaaatgaaacataaatgtatccaaatgccacactattgaggattttcctgatcactgattgtcatgagtaagttttgtgctttttcaaaagcagttttttcctacaatgtcatttcctgcttctctggctctgattttcaataaattgataaattgtgaatcctgttttcctcttatttttgtttagctataatgttgaagggcaagggagaggatggttatttataaatcttgtatcgctctgaaaacacaacatacattttccttaatctgattaacttgacttcaaatatgaaaaacaactttcataaagcagaaaagaatttacccttttttattgtgggtaagaggcaatggtacaacttttcaacttattttttgaatgttactcactactaaccatcaccatatttaaaaaaattaaagaactaatttagtttagtttattatttatttgacaaatgtttattgagtggcaactaggtcccaagtaccgttctaactactgaacatacagatgtatgtaaacaaaacaaaaatcccatcctggagtttacattctgtgggactagagataaaaaatggatacattacatagaatgtcagctagtaatcagtgttatggagaagcagcaggaatagaagataaagtgtgtgctgggggtgtggtaattttaaataggggtgtctggaaatgaaaaggtggtatttcaatcaagatttttagaccatggctgggtgcaatggctcaggcctgtaatcccagcaccttgagaggccaagggagggtagatcacttgaggtcaggagtttgagaccagcatggccaacatagcaaaaccctatctctacaacagaaaaatacaagaatggctggacgcagtggcttatgcctgtaatcctagcactttgggaggcccaggcgggtggatcacaaggtcaggagatcaagactatcctggctaacacggtgaaatcccgcctctactaaaaaagaaaaaaaaatacaaaaaattagccgggcgtggtagtgggtgcttgtagtcccagctattcaggaggctcaggcagaagaatggcatgaacccgggaggcagagtttgcagtgagctgagatcgcgccactgcactccagcctgggcaacagagcaagactccatctcaaaaaaagaaaaaaaaatacaaaaattagctgggcatggtggtgcacacctatcgtccctgctactctggaggctgaggtgggaggattgcttgagcctgacgaggttgaggctgcagtgagctgtgatagcaccactgcactccagcctctcgacagagatcctatataaaaaaaaaacctctgcatttcattgtatgtaaataagtatgtaatttcattgtatgtacagagccagtttcaaacaaaggttcttccaaatacctatcctctcaacgacaccgatcatccatgtttttttttttttttttttttttttgagatggagtttagctctgtcgctggagttcagtggtgccatattggctcacagcaacatctgcctcctggttcaagtgattctcctgcctcagcctcctgagtagctgggattacaggcacatgccactacgcccagctaatttttgtatttttagtggagagggggtttcaccatgttggccaggatggtctcgatctcctgacctcgtgatcctaccaccttggcctcccaaagtgctgggattacaggcataagccaccgccctcggcctcatccatgattttattttgccatttcaagtgatggagcttgttttagagctggaagaaaagccaaaatgccagttaatctaaactagattcctgccccagtgcagaaccaatcaagacagagtccctgtctttcccggaccacaggatttgtgttgaaaaggagaggagtgggagaggcagagtggatggagaacaaggaatcattttctatatttttaaagttcttcagttaagaaaatcagcaattacaatagcctaatcttactagacatgtcttttcttccctagtatgtaaggtcaattctgttcatttgcataggagataatcataggaatcccaaattaatacactcttgtgctgacttaccagatgggacactctaagattttctgcatagcattaatgacattttgtacttcttcaacgcgaagagcagataaatccatttctttctgttccaatgaactttaacacattagaaaaacatatatatatatctttttaaaaggtttataaaatgacaacttcattttatcattttaaaataaagtaaatttaagatttggaaggttttagaataatacaaaccaaagaactaatgacaacgtcctttatttttaaagattctagaagttgctttttgtaattagacaacataaattctgaattttttcacatattgctgccaaccccttgggtcttttcctttctccaagaaagagaaagctacagaggagtgactgaccgggtaggtggtggtagccttagctttctccaatgtttctggttgttttctttttcttgcataaaaccaaaatcaacaacgaccaaaccaacaccaatcaaggcctccccgcccctaacctttcccagtgacctgctctcatctctggatcctcctcaagcacatccctgccggcagcatctgttactactgacgctcctctacttccctcttgcgctttctcaatggcgcaaatggatccagttcttaagttctccctcccacaaaatcctgtctcctccccttcccagacatattcctggcacctcttcttccacaaggtcccatcctctcatacataccagccggtgttttttgttttgttttgttttgttttgttttgagacagtctcgctctgtcgcccaggctggagtgcaatggcgcgatctcggctcactgcaacctccgcctcccgggttctagcgattctcctgcctcagcctcctgagtagctggagcggcaccacgcccggctaatttttgtatttttagtagagacggagtttcaccacgttggtcaggctggtctggaactcctgacctcatgaccagccgacgtttttaaagacatagtgtccccctcaaggcatattccagttcctatcacgaggattcccccacggacactcagtgcccccttcctgatcctcagcgcttccctcgcgacctacaaactgcccccctccccagggttcacaacgccttacgcctctcaggttccgcccctaccccccgtcaaagaatacccatctgtcagcttcggaaatccactctcccacgccagtaccccagagcatcacttgggccccctgtccctttcccgggactctactacctttacccagagcagagggtgaaggcctcctgagcgcaggggcccagttatctgagaaaccccacagcctgtcccccgtccaggaagtctcagcgagctcacgccgcgcagtcgcagttttaatttatctgtaattcccgcgcttttccgttgccacggaaaccaaggggctaccgctaagcagcagcctctcagaatacgaaatcaaggtacaatcagaggatgggagggacagaaagagccaagcgtctctcggggctctggattggccacccagtctgcccccggatgacgtaaaaggaaagagacggaagaggaagaattctacctgagtttgccataaagtgcctgccctctagcctctactcttccagttgcggcttattgcatcacagtaattgctgtacgaaggtcagaatcgctacctattgtccaaagcagtcgtaagaagaggtcccaatcccccactctttccgccctaatggaggtctccagtttcggtaaatataagtaataaggattgttgggggggtggagggaaataattatttccagcatgcgttgcggaatgaaaggtcttcgccacagtgttccttagaaactgtagtcttatggagaggaacatccaataccagagcgggcacaattctcacggaaatccagtggatagattggagacctgtgcgcgcttgtacttgtcaacagttatggactggagtgttatgttttcgtattttgaaagcagaaactaggccttaaaaagatacgtacaactctttagggagactacaattcccatccagccccaggagtctggggcaagtagtcttgtaaggtcagtggcctgcggggacgcagtgagcgccgaatttgcctggggcaggggaaatgcgctctggcccatgtctgcgcactcgtagttccacccctcagccccagtgtttgttatttttcgggttcagcttgcttttgccccgtctccgtcgacgcaatcgccaccagtcaatggggtggtcgttttgagggacaagtggtaagagccaatcttcttggcgaaaacgcggagaaacgggactagttactgtctttgtccgccatgttagattcaccccacagagatagcggcagagctggcagcggacggtctttgcattgccgcctccccagggggcgggaagctggtaaggaagcagcctgggttagctaggggtggggtcacgtcacactaagagggtttggagaagttcaagggaggaatcctgcaaagaagaggggcgactttttccgtgtctccggacagctaatcgttttagtgacaggatgagagagcccttcgtgttctgagggaccgagtgggcgaaaagcgccggagagttggagagtctgtggttcagaatgcgaggtgacaacgtgctagcagccctcgctcgctctcggcgcctcctcggccttggcgtccattctggccgtgctggaggagcccttcagcccgccactgcgctgtgggggcccctctctgggctggccgaagccagagccggctccctctgcttgcggggaagtgtggagggagaggcgggtgtgggaactggggctgcgcgcagcgctcgccagccagcgcgagttccaggtgggcgcgggctcagcgggccccgcacccccggccccgggcagtcaggggcctagcacccgggccagcagctgcagagggtgcgccgggtcccccagcactgccggcccgcctgcaccccgcttgaattctcaccgggccccagccgccctgcacagggcaaggctcaggacctgcagcccgccatgcccgagccccctcccaacccctgtgagctccagcgtggcctgagcctccccgacgggcaccgccccctgctcctcagcgcccggtcccatcgactgcccaagggctgagaggagtgcaggcgcccggcacagccctgcgcaggatccactaggtgaagccagctgggctcctgagtcagatggggacttggaaaacttttatgtctagcctgaggattttatatgcaccagtcagcactctgtgtctagcttggggtttggggatgcaccaatcagcactctgtatctagctaatctggtgggcacttggagaacttctgtgtctagctaaaggattgtaaatgcaccaatcagtgctctgtgtctagctcaaggtttgcaaatgcaccaatcagcactctgtgtctagctaaaggtttgtaaacgcaccaatcagtgctctgtgtctagcaaatgtagtggggacttggagaatttttatgtctagctagaggattgtaaatgcaccaatcagcactctgtgtatatctagctcagggattgtaaatgcaccaatcagcaccctgtcaaaacggaccaattagctctctgtaaaatggaccaatcaacaggatgtgggtggggtcagataagggaataaaagcaggctgccccgctgggtgccagtggctcacacctgtaatcccagcaatttgggaggcctagaggggtggatcacgaggtcaagagatcgagaccatcctggctaacacagtgaaaccccgactctactaaaaagacaaaatattagctgggtgcggtggtgggtgcctgtaatcccctctactggggaggttgaggcaggagaatggcgtgaacccgggaggcggagcttgcagtgagcccagattgcaccactgcattccagcctgggtgacagagggagactccatctcaaaaaaaaaaaaaaaaaaaaaaaaaaatgcaggctgcctgagccagcagcagcaacccgctctggtctccttccacgctgtggaagctttgttcttgtgctctttgcaataaatcttgctgctgctcactctttgggtccgcatagcatttatctgctggtaacaccgaccgcagaggtctgcagcttcactcctgaagccagcgagaccacgaacccaccaggaggaatgaacaactccagacgggaggaacgaacaaactccagacatgccgccttaagagctgtaacactcaccgcaaaggtctgcagcttcactcctgaagccagcgagaccacgaatccaccagaaggaggtaactctgaacacgtccgaacatcagaaggaacaaactctggacacatcatctttaagaactgtaccactcaccgtgagggtccgcaacttcattcttgaagtcagtgagaccaagaacccaccaatttcggacacaagaacatccggcttctactgatggaaggccacgactcctcagtagaaagagggcccaggcaaagaaaatgagagagagtccttggggtggtgacactatcttgggaacatggagtgctaggaaacgataactggaagactaggatgaaatctgcaagttaaaaaatgacactacccatatatccttctcatcccattctccttttttcgagaccccgttaaagagatcttggttagggacctttggttttggaaaggcactgtttctcctttttgtcaaacactcaactttcaggccacactttttttttttttttcgagacaaagtctcgctttctcaaagaccagcccaggctggtcttgaactcctgagctcaagcgatcctcctgccttggcctcccaaagtgctgggattacaggcatgagccaccactcccggcctcagcttggataacttggcttgtacaggcctctggtggagacagtaaccaaagttcgggttgccaggtttgtttcattaaagggattttgttgaggctgaaagaaaaaaaaatcgatgtggaggaaaagctaacttgtgccaagacaaggtgagtcagtcacatggacttaacaataatgtcaattatgaaagctgaaggcctaggacccagctatctgactctactggctgtagacctaaggagcaggtagggttaaccatagctttcgtgtttacacacgttcaagattaatgctcttgctgaaagaatttttttacatgccagccaaagagagttccttatggagacctggatatggtccagctaagctagaatctcccacttcctgttttctcttagttggcccaccagctggaggagctccagaatatctaaattaatttccaattgtgtaatttgagaaaaagagacgaagattaatttccctaacgagtagggaagtgtgtttcttttttttcttttttttttgagactgagtctcgctctgtcgcccagcctgaagtgcagtggcacgatcgcggctagtgcactgcgaactctgtctcccgggttcacgccattctcctgcctcagcctcccgagtagctgggactacaggcacccgccatcacgcccagctaattttttgtgtttttagtagagatgggggtttcaccgcgttagccaggatgacctcgatctcctgacctcgtgatctgccttcctcggcctcccaaagtgctgggattataggcgtgagccaccgcacctggcaggaagtgtttcttaaagttggaaagtggtatttcagaatatccgcttttggcagactgagtcagtcacttcattttcctgattttttgcctaaggtcctggtgaattgacaaagattctgcccaaattttaacgaccccagtaattacatgtcatatgaatgaatacttgacgtcagcaggactgcgttttggtggtgaacttggttctaggtagaaacaaagaatggagaaaactgggggataattatcttagggtttcaaaaaagtgcctgatcttcacagacttcagggtccttaaaataacagtcttaattgtagtgttttacagggcagtgcattacattgtcaaaaacagtacaggtttatggttctaatgactggtttattatttttaaaaatgtttaattgaacttaatttttttaaggagacagggtccggctttgttgcccaggctggtcttcaactcctaggttcacgatccttccacctcagcctcccaaattgctaggattacaggcatgagccaccacaccgggccaattttttattttatttttgagacagagtctcgctctatcacccaggcgggagtgcagtggcatgatcttggcgcactgcaaccttgcctcccagattcaagcaattctcttgcctcagcctcttgagtagctgggaatacaggcctgcgccactacacccagctaatttttgtatttttattagagacgaagtttcaccatgttggctaggctggtctcgaactcctggactcaagcgatctgcctgcctctgcttcccaaaatcctgggattacagacatgagccactgtgcctggcctgtattataatatttttatatttgaatgacattttgaaagaacttgcatattcatttttaatttgatccttatggtaacactgtgagatcggcaaaacagacatattagacctattttacagattaaagaactgaagctcaaaggtgaactgacctgctcacagttttatgtctagtaatgggccagagctgtgtctagaacccaagtcttcccattttttgtgctcacacacatacacacaatttgctgttctgattagatgacatttcattgctttcaatttgcattgttctgaccaccagaaagtttgaaagtcttctgaggtatttgttaggtgttctgacttcttctatgaattttatgtatactttttcctgggttgttaattgtatcattagcagttttgctgatactctgggtgtgttgcagatattaaccctttgctgtgggttgtgatggttgtttgttgtcttctgattttgtggatttttttaaccatataaaatatttagtatgtaatgaaatatgcccaactcatcctttgacttctatgtacattataacctgcctttaaatgtgtatttcttttgtaggtaaaagtttcatttgatctgaatagtattaaaataaaatacctggatgaggaagatgaagaggtaaagtatattatggtacttattgctaggtgttcagaatagggatcttatttctccagtgatatgggctttaataattcgaagtagcgcttagctcatttgtgtctcaaaataataataataataataaaaacaatgagacatgcaagagatgtcgggagaagcaccagaagattccattgaaatcttgctccccagaagggtgggaacagtagggacagaaaactgctgtggttcattatgtttcatccccatttcgcttcattttattgaaccccgtctctactaaaaatacaaaaaattagccaaatgtggcagcaggcgcctgtagtcctagctacttgggaggctgaggcaggagaatggcgtgaacccaggaggcggagcttgcagtgagccgagatcgtgccactgcacttcagcctcggtgacagagcgagactccgtctcaaaaaaaaaaaaaggatatcagctttttattttcttttcttttctccttttctttctttgctttgcttttctttttgttttgggacagagtctcactctgtcatccaggctgcagtgcagtggcgcaatctcagctcactgcaacctctgcttcctgggttgaagcgattcttgtgcctcagcctcccaagtagctgggactacaggcatgcaccaccatgcctggctaatttttgtatatttggtagaaatggggtttcaccatgttggccaggctggttttgaactcctggcctcaagcaatccagcggcctcagcctcccaaagttatgggattacaggcatgagccattgtgcccagccaggatatcatcatatttaatcctcacatcaactgacatttgccccaatttacagatgaggaactgaggcacagagaggttttggtacttgcctgaggtcacacactctgggctctctgcttggggctgagggccaaggggggttgtgactgacttctctttcctgaacatcaataaaattcaatttagaaatttctgtcttcagtgctatctcgaggggcctgtgaaaaatgctgactcggtggcagctgtcttagccccatactcattgggttgccctgagccccacactgttttaaggaagtcccagcaaataatatgggatagaggtgagatccaaacctaagcagccctggctctaaaacccactgaacaaagctgcctctccaactagcatcagaaagaactaggtgagaatcctacttctatcacttactagttctgtggctctggccgcccccgcccaagttacttaacctctttttttttttttcctttttctttttctttttttagagacgaagtctcgctctgtcaccaggctggagtgcagtggcgtgatcttggctcactgcaacctctgcctccgggttcaagcaattctcctgcttcagcctcccgagtagcttgggactacagacgtgcgcaaccatgcccagctaattctttttttctttattttattttatttttttttttgagatggagtctcgctctgtcgcccaggctggagtgtagtggcgcgatcttggctcactgcaagctctgcctcccgggttcacgccattctcctgcctcagcttcctgagtagcttggactacaggcgcccaccagcacgcccagctaatttttttttttctttgtatttttagtagagacggggtttcactgtgttagccaggatggtctcgatcccctgacatcgtgatccgctgtcctcggtctcccaaagtgctgggattacaggcgtgagccaccgcacctggtcgattaacctcttttaagcctgttttctcatccatacaatggagataatggcagcacccactgcttggtaaggaatattaggtgaacacaggtgcctatgtgggttcctccattttccataaatgttaattcccttatccctcatctcctaggttagtcccagaggacagatttgaagtttgaaaacagaaagtaactgccaaaagggattatttagggcagagattgtccccttttattatgctttaggtcctcagtggtgagggcaggggacaggagaagtgggatccagcccaaattcttggatctcatcgtagagtgactctttaggggcttaggattctgcattttggacccgtccccagggcattctgatgcctgcagttctcctgtctggctttgaataactctgggtagtgctttaaatctaagctgacataccagtgggatgtgaactgtccttgcaaatgttttgagcccttcctgcgctggcctccaactctgccttgctcagtctgtctttagctcctttccattctggccttctccctttcctttttcacttcctttttttttttttttgagacaggatctcactctgttacccaggctggagtgcagtggcatgatcttcgctcactgcaagctccgcctcccgggttcaagcaattatcataccttagcctcctgagtagctgggactacaggcgcacaccaccacacccagctaatttttgtagttttagtagagatggggtttcaccatgttggccaggctggtctcaaactcctgacctcaagtgatccgcctgcctcggacactcaaagtgctaggattacaggcgtgagccaccacgcccagcctcctttttcacttcctaccttcctccccacctctgggtgtaccctcccctgagctcagcctgtatttctatctgctggccacttaccagccagtcctttcatctacaatgccctttactcacctagaaagctcacatcaaaagtcgcctcctccagaatacctctcaagttctcctctctggtcccttgaccctttgcaggtaccttttttcttgtacaagtcacatgataatgtaaggggtttttttccccatctagagcctgcctggtgggctcatggtccatttgtggaaacatgcatttccctctcctccgcccccctccttcatgatccatgctttaagagcttccccaaggcatgcagagcaagctgagaagaggtagacaagcctgcagacctttcaaagaagtggggtggcttgggaagtaaaagaagatctggagataggagttcctaaaaagcagacaagagattaccgaggggttccccacagctccagcacacagcagctgcaaaaaaaatgcagtggaattactgagggacattatgggcttgatggaggacagggaatgcttgtgccaagccaccaaggatcatgctgtggcagttgtgaccagatagactatacttttgccaaggtgaaaggatttccctactaaatcctttactttccactttgtttaaaatgagtttaacaccaagaaaatagttgtctctatgtccttatttctaatcttcctgctcaaccatgaactgcactaaacacactcagacccatctaacctaaaattgagaaagggaggttctcactcctggagagagaattactgaaagggcggccctcatacagttcagggtcatacccccaatagctggttttatatttgaaagcagacactgggactctgacctttgcagagataaaagggatactttcctaacccagagaggccaaaggagcacaggacgcccaggccgagggcagtgaagcttgcagacccaggctgtgcaacccccacagcaggtctcctcacgggatagatagactattggccccaattcctcagccctacatgcacccaccccttgccatggtttcgttgtgggtggagggtactttcccagcccctggctttgggcttgcccacgtgtcttgctctggccatggaatgaagcacaaaggagagcctgctagttcctaacccacgcctgaagacgccttaggcggttctgcggaccccgtgcacttccaccttcagccagaaggccttctctggtgcagccgttgcttcagcctcggtccaaaaggatcggagccccctggccgatccgcaggcctgcagggagccacagagcgcagcggccggcccagcgttcaagcccaagcacaggcctgcaagaactttcttccaactgccgtttgggatggttgattaggacgcgttgctgtggcggtagctcaccaatccaatgcatgcacccgctcctttattaggctatagggccagtggctgcgacagggacctgatacaacagtgcgttaaataaggagcttattgagctatcatgtcataagccggtggagaagtccaggcctagtgtagggtctctggccggggctgtagccttcatccgcgtggaaccttcccatggttcgcaggtcgcggtcttcggagccttcagcctcgtgagcccgaacagtccatagggcggcgccagaccctcttcccaacgccaccctctaaagcctcggctccaaccgattccacttctgcttcaggctcaggattttcactcttctcgaatgggggtggccctcccctgatcttctgaatcgcaacagcatctccctccctccaggacatcagagccagagctgggcgagaggccctgacctctggggtagggtggcagcgtccccttgaagatgcggtcccgcctcccatccccaggcgcccggcctctcacaccctcagcaccctgctcacctccagctgaagatgccagggcacctctgcttcctccctgctctctgcagtaccgcagagtgagcataaaagggcttaatacaggcttcgccgggcgcagggctcccgcctgtaattccagtactttgggagaccaaggcgggagggtcacttgagaacaggagttcaaaaccagcctgggcaacaaagtgaggcccgtctctaacaaagacaatgagaaataaatctaaaaattggatagactgaaacaggcaatgaggaaaggattccctatttaataaatggcattgggaaaactggctagccatatgcagaaaactgaaactggaccccttccttacaccttatacaaaaattaactcaaggtggattaaaaacttaaacataagatctaaaaccataaaaaccctaaaagaaaacctaggcaataccattcaggacataggcaggggcaaagacttcatgactaaaacaccaaaagcagtggcaacaaaagccaaaattgacaaatggaatctaattaaactaaagagcttctgcacagcaaaagaaactaccatcagagtgaacaggcaaccacagaatgggagaaaatttttacaatctacccatctgacaaagggctaatatccagaatctacaaagaacttaaacaaatttacaataaaaaatcaaacaaccccatcaaaaagtgggcaaaggatatgagcagacacttctcaaaagaagacatttatgcagccaacagacacatggaaaaatgctcatcatcactggccatcagagacatgcaaatcaaaaccacaatgagataccatctcacaccagttagaatgtcagtcattaaaaaggaaacaacaggtgctggagaggatgtggagaaataggaacgcttttacgccattggtgggactgtaaactagttcaaccattgtggaaaacagtgtggtgattcctcaaggatctagaactagaaataccatttgacccagcgatcccattactgggcatatatccaaaggattataaatcatgctgctataaagacaaatgcacacgtatgttcattgcggcactattcacaatagcaaagacttggaaccaacccaaatgtccatcaatgatagactggattaagaaaatgtggcacatatacaccataatatactatgcagtcctaaaaaatgatgagttcatgtcctttgtagggacatggatgaagctggaaaccatcattctgagcaaactatcgcaaggacagaaaaccaaacaccacatgttctcataggtgggaactgaacaatgaggacacttggacacagggtggggaacatcacacaccagagcctattgtggggtggggggaggggggagggatagcattaggagatatccttaatgtaaatgacgagttaacaggtgcagcacaccaacatgacacgtgtatacctatgtaacaaacctgcacgttgtgcacatgtaccctagaccttaaagtataataataattaaaaaaaaaaaaagaataaaagaggtccctttttctgggagattgatgtaggggagcgagcgtgtgagttggaagggaggcattgaggatcagccatttaaagcagcatacaaggatgttcaaggctcgagatccacaggtgtattttcagaacctgaatttcctggcggggcacagtggctcatgcctttaatcccagcactttgggaggtcaaggtgagcggatcacttgaggtcagttcaagaccagcctggctaacatggtgaaactgtttttacaaaaaaatataaaaattagccgggcatggtggtgagcacctgtattcccagctattcaggaggctgaggcaggagaatcatttgaacctggaaggcagaggttgcagtgaaccaagatcatgctactgcactccagcctgggtgacagagtaagaccatctccaaaacaaaacaaaacaaaaacccaaaataggccgggcgcggtgtctcgcacctgtaatcccagccctttgggaggctggggcgggtggatcacctgaggtcaggagtttgagaccagtctgaccagcatggtgaaaccctgtctctactaaaaatacaaaaattagccgggcatggtggtgcatgcctgtaattccagctactagggaggctgaggcagaattgcctgaacgcaggaggcagaggatgcagtgagctgagattgtgccattgcattccagactgggcaacaagagcgaaactccatctcaaaaggaaaaaaaagcaaaagagaaaaaacccaaacaaacaaaacccctgaacttccctgcgggcacattttctctggcagcctttttcaatgagagctatgttttctccgatactatatggcctgcggaccgctcagctttcattccagtgaaaacattccagaacaaactccaggtcggtcccaggtgtttctccaatcaactcagggcatggttgtgtgtcacctgctgcccagctagaatgacacctctccaggcctctgacttagctaggtctccaccatgtgactccaccgtagactccatgccttcttcttttgcaaagcctcggacacccaaacacctaccaaaagtgggtagggtgccaggacacctccaagtataagtagggctccccaccatgcctggatgtggagttgtgctgcagagtggtggctgctcatgacattcatttcacccctttctgtgcaggtgctggaagcccaggaagcacacatcaaggctcccttgccagcagggtgctgccaataaaaggtagtcacgtggaatttggaatgtggaaaggaggtagaagtcatcctttcctcccctgtagcagcaggcgtgcaggctctggtggtcagctggactccatactcccccaccagtcaccagcctggggaccgtggggctgcaaggacctcagcagcggtgtcccaagtttcctgacttcttccatcctctggaaatcagctgtggtaaagtagcctgaaagccagtggtacaaccccctccccacaaccttcaccacctctagcccctccaatgaaaagcactaattgcctatatacaacccctttttgtttgaaatatctagagtaatttctgttttcctatctggggtagtgtaacgtaagaagaaatatacatttggtctctgcccccggttcctaacacaaagctcctaaaacccttggaaattcctgaaagatgggggtgctaggagcattgtctttttttttttttaaatttatcatttttcttttctcccaggtgttttttccttttttttttttttaacttttattttagattaggggatacatgtgaacgtttgttatatagctaaacttgtgtcacatgggtttgttgtacagattatttcgtcacccaggcactaggcctaatacccgatagtttttttcttttttttttttgagatagagtctcgctctgttgcccaggctagaggcacgatctcggctcactgcaacttccgcctcccaggtttacgccattcttctgcctcagcctcctgagtagctgggactgcaggtgcctgccaccacgtccagctaattttttatgtttagtagagatggggtttcaccatcttggccaggctggtctcgaactcctgaccttgcgatccacccacctcggcctcccaaagtgctgggattacaggcgtgagccaccgtgcctggccagtacccagtagtttttttggctcctctccctcctcccacccttcaccctcaggtagggcccagtgtctgttgttcccttctttgtgtttatgagttctcatcatttagctcccacttataagtgagaacgtgtggtgtttggttttctgttcctttcttagtttgctgaggataatggcctcaagatccatctgtgttcctacaaaagagatgatcttgttcttttttatgattgcacatcttttgttctaacgtttggtccttcaccttggttcctgacacaaggattcctaaatcccttggaattttctgcatgataggagcgtcctttgttctcatgaggtgactcttggtgggctccttatttggggactggtcaccaaaaatacctaactatggttggaagcttagtgctttcagccccattccccatcctctggggtggggagcagagctggagctcgatcatgcctgcgtgacaaagcctccagaaaaatccttgaaagacaggacatggagagctgctgggttggcgaacacatccatgtgccgggaggatggtgcaccccaactccacaaggacccttccagacctcaccctgtgtatctcttcatctggctgttcatttgtatcctttaaaatatcctttgtaataaatcagcaatagtaagtaaactattttcctgggttttgtgagctgttctagcaaatggtcaaacctgaggagggagttgtggggacctccaatttatagccagttggtcagatgcataggtgatgcttggccttgcacctggggtctgacgtgagggcggtcctgtgtgactgagcccttaacctgtggagtctggtgctcactctgcttagggcttctctgcctttgtagtgtcctgtctagaaggcctttccttcctcttttctgctcagaaaacttttcttccacttcccttcttctaagccatcccttatatctactcctttccagccgaccaagagcagaaccacggctggctccactgccagcatgctgtcccacactgtctcctcaggatgtattcagatgtccggccctctccctagtctaggagccctttgaggaaagggatgctgtcctagtcaactctttcccagcgccaggcacaacgtctggcatgttccatctttttcatggactctccccaggcggcctgaccttccctcctctgaactgctgcatttcctgtctgcatcatgtttgccctaatcagacatcgccttatttcatcatcctttaaaaaatgctttatttctctggcagatttcattggaatcagaattttctttcatttagtagctgttggccttgtgtccacctttctgtggcactcaggtctcacttaagagctggccctctgagctatggtttgccgtcagtgagatggagacagaggcagccctaggcagtcatgttttgttccacctgaccctgggcacccctccccctcccaggctactggcagggatgggcaccggcctgggagagacagctcatccacaggctggcccagcagaaactctgggctcagacaaaactgctcaattgaggacaaactgggcaaaatagaatcttactttgggagtttttagaaatatggttggggtagcattggggaataataagaattgtagccaggcatggtggtgcatgcctgtagacccccagctactctggaggctgaggcaggaggatcttttgagccctagagcttgaggctgcagtgagctatgaatgcaccactgcactccaggctgggtgacacatcaagaccctgtctcaaaagaaaaatgtgcacatttgagatacataaaaaaattttttgttatataaaaaaaaattatcaccgggcacggtggctcacacctgtaatccagcactttgggaggctgaggcgggcggatcacgaggtcaggagatcgagaccatcttggttaacatggtgaaaccccatctctactaaaaacaaaaaattagccaggtgtggtgacgggcacctgtagtcccagctacttgggaggctgaggcaggagaatggcgtgaacctgggaggcggagcttgcagtgagccgagatcgcaccactgcactccaacctgggcgacagaccgaaaaaaaaaatttagcataaaaatgtgaaattatgtaaatatgccaaaataggaacctggaggtgcttggaatccagactttgggagcccagcagtgcaaggatctctactcttggcttctttttttcttgagatggagtcttgctctgttgcccaggctggtgtgcagtggcccagtctcggctcactgcaacctccgtctcctgggttcaagcaattctccctgcttcagcctcctgagtaactgggattacaggagcacatgaccatccccagctaatttttgtattttttagtagagacggggttttgccatgttggccaggctggtcttgaactcctgacctcaggtggtccacccacctcagcctcccaaagtgctggaattacaggcgtgagccactgtgcccagcctagtcttggcttcttgtcaactccctgcttatgtccaacactcacccctattacagagctggtgtgggggagtttctgtcctggtgacttaacagtgtaattaaagtgcttagcactgtacctgaccacagctggtgcccaacaaacagcagctgccatcattctcaccatccgtatgttattgttattgactcttcaatggcaaccatggcttatccccctttatctccctatgtcctacagccggacagaggaatggttacaaggctttgagcctaacagtgctggcttaaaaccgtaacttgtcgttttggatgtgtggccttggacacttgggcaggtcacctacgtccttctagccctgtatccttatctgtcagatgatgattttaaaaactatgcttccatggattgctgggctaaatcatataagactgtaaaatgcctaacccaggatttggcatcaagtaagcaaattgtaaatggtagctgctgttctgcctatgactatttagtcttgtgctttactttttatttaattatttttaagacagagtttcagtcttattgcccaggcaggagtgcaatggcgtgatcttggctcaccacaacctccacttcccaggttcaagtgattctcctacctcagcctcctgagtagctgggattacaggcatgtgccaccatgcccggctaatttttgtgtgtgtgtgtgtgtgtgtgtgtgtatatatatatgtgtgtgtgtgtgtgtatatatatgtgtgtatatatatatgtatatatgtatatatgtgtgcatatatatgtatatatgtgtgtatatatatgtatatatgtgtatatatatatgtatatatatgtgtgtgtgtatatttatttatttatttatttattttattttttttggtagacacgggtttctccatgttggttaggctggtcttgaactcccaacctcaggtgatccgcctgccttggcctcccaaaatgttgggattacaggcataaaccaccatgcccggcctagtcttgtgctttagactcaaatatttgttggcccactgaagtcaccacacagataaagacacttttcattctcagtaaggaactttgggagataattggggcaggcagctaaagaacaggtgtcttttgtctgacatcagcaaactcatggaaaccgatgggcggctcactttgcttagaacccccacagcacgcacacagggctgcttcccagtcacactgctcctgggatgggggtgctgctgttctgcagttagcactgttctttacttcctattactgaactgccagcgttcatttgtgttcagttaggtagattaccaattcttgttcattcagattttcttttgctcactaatgtgtttcatgttcactaacttaccaaatgtgatttattagtgactttttttttgaagatggagtggaggaatccttgcgccttctgcagcattctgctgccgttatggaacagtgcatctatggaagtgcatcagcgggggatggggagaggctagggcagtacacgtgaatggagaggtagccccaccagtatgttttctgaaatacagtcccgcagagggcagtcttgggaaattactgctctcacacactcttcttgaccctatccctccagcacctccctgctatccaaaggttgggatttttaaaaagaaaaataaattataaaaaaaaccaggccgggtgcggtggctcagtcctgtaatcccagcactttgggaggctgaggcgggcagatcacaaggtcaggagatcgagaccatcctggctaagatggtgaaaccctgtctctactaagaatacaaaaagaaattagctgggcatgctggcgggcgcctgtagtcccacctactcgggaggctgaggcaggagaatggcgtgaacctgggaggcggaggttgcagtgagccgagattgcaccactgcactccagcctgggtgacagagcgagactccatctcaataaaaaaaataaagtgaattttcctccatcttgtaagggcgaaaagccccctaccatgtctgaatgaacattcatgcatgggcttgagggcttgggaaaaagacagggcttggccacacagtgcaggtaggcccagtgatcctatgagaggggccaggaggtggtaggtcccctgtgggcaggaggtcaagtatgtggtattatacttgatgaaccaggggagagggcaccaagaacaacgatatttaattgtaaaatctccaccctctgaggatatgtttttaggtctggatgactaattagactgggaaacaaggcagggaaagatggccctgtgcttcctctgcctgctgcctttgtggatgcgtgggccgccagcttcagtcctgcttttctttctgatggcccttgttatttatgcataaatatttaactacacatttaaatgtcttactgcatggctagaattagttatatatattctttaatataagaaaaataagagcagctccgagggcaggcatggtggctcatgcctgtaatcccagcactttgggaggccgaggcaggtggttcatctaaggtctggagttcgagaccagcctggccaacatagcgagagcagctccggtggcgggaggagtggcagcggccaggcagcccagcttcgcgaaggctgtaggcacaccgcggccagcaggcacctggcacccaccttccctgctgccaggatgcccaagaaaaaggtcagctccaccgaaggggctgccatggaagagcccaagaggagatcagcgcaattgtcagctaaacctcctgcaaaagtggaagcgaagccgaaaaaggcagcagcgaaggataaattttcagacacaaaagtgcaaaaaaagggaaaaggggagcaaagggaaaacaggccgaagtggctaaccaaaaaactaaagaagatttacctgcagaaaacaggggaaacgaaaactgaggagagtccagcctctgatgaagcaggagataaagaagccaagtctgatgaataccatagaccatgtcttatcagtggtccctgtctcccttctttacaattcagaggaattttttttctttctttttttttttttttgagacagagtctcgctctgtcgcccaggctgcagtgcagtggtgcgatctcggctcactgcaagctccgcctcccgggttcacgccattctcctgtctcagcctcccgtgtagctgggactacaggcgcccaccatcacgcccggctaattttttgtatttttagtagagatggggtttcaccgcattagccaggatggtctcgatctcctgacctcgtgatccgcccgcctcggcctcccaaagtgctgggattacaggcgtgagccactgcgcccggcctccagaggaatatttttatcaactattttgtaaatgcaagttttttagtagctctagaaacatttttgagaaggagggaatcccacctcattccattttttaagtgtaaatgcttttttttaagaggtgaaatcatttgctggttgtttattttttggtacaaccagaaaattgtgtaggatattgaattatgggagactttgacagtctcgggtgtcagcttaacattccatagatgggggttagtttttatatcctgtaatacaaagcatattaaatggcaatatggagtcagtcctgcatttaatgtcttgaacattttaaattacttccatccccatgttgttttgtagtagaattgtttcctaaagaaaacaactccttgattatggctcaccctgttggagttgtgggcactctgtaacatctttggttgtggtagtcctgttttcctaataactttgttattgtgaagtgaaatactaaaaatttgaatatgtagtatacatgctattcagttgtgaactgtgggccatacataacagctgatcaacatgtgaagatatgggtacttagtctcttaaggaaaatttgcttccaaattttaagctggaaagtcactgggataacttttaaaaagaattacagtacgtggctttttagatttttgttactttttttttttttttttttttttttttgagatggagtctcactctgtggccaaagctggagtgcagtggtgcaatcttggcttactgcaagctctgcctcccgggttcacgccattctcctgccttagcctcccaagtagctgggactacaggcaccctccaccatgcctggctaatttttcgtatttttagtagagacggggtttcactgtattagccaggatggtctcgatctcctgacctcgtgatctgcctgcctcagcctcccaaagtcttgggattacaggcgtgagccatgaaacctggccgatttttgttacatatgttaagaattgtgtacaaattgaaatgtctgtactgaccctcaaccaataaaatctcaattatgaaagaaaaaaaaagaaaaataagtaattttacaggaggcctgaggtgggctagggtcactctgtgttctcctcctagggcagggcctcactctcttcccctctcagcagccgactctcctgttgagatcttctctgttggggattcaacatccctgggataagaataacaatgccaaggttttgactcttgaaaggagcaattaagtttctcaccccctcctcattttagatgggaaccatgagggccccgtcgtttaccccgcatcactgttgaagatctcatcctcactggaagactccttgtcctgcagcctcatggctttttttttttttaagatggagtttcactcttgttgcccaggctagagtgcaatggcgtgatctcggctcaccgcaacctctgcctcctgggttcaagcaattctgccttagcctcccaagtagctgagattacaggctgcgccaccgcgcccggctaattttgtatttttagtagcgacggggtttcttttttattttgagacagagtctcgctctgtagcccaggctggagtgcagtggcacgatctcggctcacggcaagctctgccttccaggttcacaccattctcctgcctcagcctcctgagtagctgggactacaggtgcccgccaccacgcccggctaattttttgtatttttagtagagacggggtttcactgtgttagccaggatggtctcgatctcctgacctcgtgatctgcccgcctcggcctcccaaagtgctgggattacaggcgtgagccaccgtgcccggcagtagtgacagggtttcaccatgttggtcaggctggtctcaaactcccaacctcaagtgatccacccgcctcggcctcccaaagcgctgggattacacgtgtaagccatcccgcctggcctttctagttagaattctgtgaggtttgtataaaaggaatagagtgggggcccaaaaaccagtaagatgagaaagtactgtttgctcagttctaggatccatgaaataaataataaataaataaaaaagagaaagtagtgtttcctgccactttagaggaaggactcacatatcctaccttccatcagccttgaaggagatgagtgccctctccaacacctggtggccttccctaccccttccccaaagcctccaagaaggcccctggcctagcctgatgcccactatcagcaggaacaggcacgacaaactttccccttcctatccctccccacctctggaaagggctggggacagcagatgtgtccttgttagttccatccatttcagctttggctggggagctaatttcactggagccaggataagcattagggtaagtaactatttttcctgtcttgggcagtttcctcactgacaaatgagggcagagttctaagctctcttctaattctaaaattctaatgtaaaaattgccagactagtggtggcgcaagcctgtaatcccagatactcaggaggcttaggcaggagaatcgcttgaacccaggaggcggaggttgcggtgagctgagatcgcgccattgtactccagcctggcaacaagagggaactccatctcaaaaaaaaaaaaaatcaccagactaatatttaccttgagtgttatgcgcatccatgtgaagagaccaccaaacaggctttgtgtgagcaatagttttttaatcacctggagtcagcaaaaggagatggggtggggcagttttataggatttgggtaggtagtggaaaaattacagttaacgtgcgttttctcttgtgggcaggggtgggggtaacaaggtgcttggtgaggagctcctgagactcattgtccaggagaaggaatgtcacaagatcaattgatcagttagggtggagcaggaacaaatcacaatggtggaatgtcatcagttaaggcaggaactggctatttcacgtttatggttcttcagttgcttcaggccatctggatgtatatgtgcaggtcacagggttatgatggcttagcttgggctcaggggcctgacattgaggattcttttttatcttcctctgatgctcttctataagaatgactctgttttggaagaaaacgcaattaagattttccatcacaacaaccactatctccaaatctgtattcattccttttaattcattataagtctcatctacctaatgagataacttttttgaagacaggaattgtatgctgtttaacagtgctttgtttcttccatagttcagtcatccttgatattttgcgggggactggttctaggatactgcccccacacaccagaatctgtgaacgctcaatcccttacatataatggtgcagtatttgaatataaccaacacacatccccccgccaccacccaattaacttttttactttttttcccccccgagacagagtcttgccctgtcgcccaggctggagtgcagtggcacgatctcggctcactgcaagctctgcctcctaggttcatgccattctcctgcctcagcctcccgagtagctgggattacaggtgcccgccaccacaccgggctagtttttttttttttttttttctttgtatttttagtagagatggggtttcaccatgttagcgggtggaccttgtgatccgcccaccttggcctcccaaagtgctgggattacaggtgtgagccaccatgcccagccaatttttgtatttttagtagagacggggtttcaccatgttggccaggctggtctcgaacacctgacatcaagtgatccgcccaccttggcctcccaaagtgctaggattacaggcatgagccaccgcacccagcctcagactaaactataataaaagagaaagcagagagagtaagagcacctcatatggaatcacctacatttcagaagctggaaagaaagagagtggtctacttgatgatatgaagcatgatcaatcagtatcaatactagctttagggtgaaggcatagccaaattggaaactgtggacaaatttcagaaactgcaccaaaacttacaaacctcaaatcctagttttcttcctttctctttggccactaccctcagtttcttttttttgtttttgagacggagtcttgctctgtcgcacagcctggagtgcagtggcatgatctcagctcactgcatcctccgcctcctgggttcaagcaattctcctgcctcaaccacccgagtagctgggattacaggaacccaccaccgtgcctagctaatttttgtgtttttaatagagacggggtttcaccatcttggccaggcaggtctcaaactcctgacctcaggtgatccacccacctcaagcctcccaaagtgctgggattataggcatgagccaccatgtccggcaagtttctttttacttaatttgtatttatttatttatttgagaccgggtcttgccctgttgccctggctagagtgtagtggcgtgatcatgggtcactgcagcctgaacctcctgggctcaagcaatcctcccaccttagcttcctgagtagctgggactacgggctgtcactactacacctggctaaatgttgtatttttagtagagacagggtttcatcatgttggccaggctggtctcgaactcctggcctcaagtgatatgcttgtcaaagtgctgggattacaggtgtgagccactaggcccagcctcagtttcttttatggactcacttacctctgcagattggctcaaatgtcattattctcaggcttctctcctgtttacaggtgtcctgggccatccagtccagtctcatgatatttgccacccaatgtgctcatgtttcccaaaccagcatctcttctctagacccatcctctaattagctgtttctcaagcaaccttttgactgttgtttctttttacttccctggtaccagggataaaagtcccctgaattcaaacatgaatattcacctcacccagtcctctgggaggtccataagtccctgttttgggaagaatgaagctgagctctagctaaaaaaaaacaactccatttggggatctaaaaattttgcagcttggaagtgcaaaaaaaatgtgcagctttgcacagtgagtcagggtgaccaagttctcctagtttgccaaagagtctctcagttttagtactaaaagtcctaaatcccaggaaacctctcggttccaggcaaaccaagtggtttggtcaacctgacagggaggtgtcctttatgaggtatggcaagagtgaaggcttggcaaagggtggctgtgcccatcaaacacagacagtttatgaatagttgggtgggtggggcatatgctttattccctagggccctcagggcctttgcagaggtctgtaagagctggtgggggcaatgggacagtgaaattcgggtataaggctaatgtgacctcatttaaaatcacaggctggagaggcccagggactttgggtatctatttacatagccaagataacatcagattcaaattttatttagtgctttttgtatctatgactgtcaaacattgtcacagtttaacagctacataatactccatcaaaaggatattatatgaagtgtggtggctcacacctgtaatccccacatttttgggaggccaaggcagatgaatcacttgaggttaggtgtttgagaccagcctggccaacataacaagaccacatctctactaaaaatacaaaaatgagccacatgtggtggcgcatgcctatattcctagctctgggactctgtctcaaaaaaaacaaaaacaaaaacaaaaaaaccaaaagaggattttcagtgtgttccagaaatgttcctattataaatacatctttgtgctaaaagttttttttccctatatgtaagatttgtttcaggctagatgcagtggctcatgcctgtaatcccaacattttgggaggccaaggtagaaggattgcttgaggccaatagtttgaaactagtctggtcaacatagggagaccccatctctacaaaaaaatgtttaaaaaaacttagccgcacatggtggcacgcccctgtccttccagctacttgggaggctgaggagggaagatcacttcagcacaactgttcaaggttgcaatgagctatggttgcaccactgtacctcagcctgggtgacagagcaataccctgtctcttaaaaaataaaaatatacatttttttctgtagtaatttggaagtaccattaagtgccagagactgtgctaagcactttacatgcattatttcctttaaatatcatcataaataacaccctggaataggtaatattctccccaggtagaaactggtgcttagaggttatgtaactttcccaaggccacatagtgtgtgatggagccaagatttgaaatcagcaccaccacatactttcaaaatatgttgatggtgaattttggtttgtttacagctgtgtcatctgttgcctggctttgctctactgagccaccactgagccttgtatatgtctctctttatttttggttatgtgcactgccccagtgaccacacagttctctctttagcacctctcccactgtgttgaaattgcttgtttacacttccactccacctacaagtggagggtagaactgcatttattcatccttttccaacacatctagcaagacgtagtagagacgcaagagaaatttgttaatgtataaaaggagaactccaggccgggtgcagtggctcacacctgtcatctcagcactttgggaggctgaggtgggtggatcacgaggtcaggagttggagaccagcctggccaacatggtgaaaccctgtctctattaaaaatacaaaaaattggctgggcgtggtggctcacacctgtaatcccagcactctgggaggctgaggtgggcggatcacaaggttaggagatcgagaccatcctggctaacacagtgaaaccccatctctactaaaaaatacaaaaaattaactgggcatagtggcggacacctgaagtcccagctacttgggaggctgaggcaggacaatggcgtgaacctgggaggtggagcttgcagtgagctgagattgcgccactgtactccagcactccagcctgggtgacagagcaagactccgtctcaaaaataaaaaaataaaaaaaaataagctgggcatagcagtgggtgcctgtaatcccagctactcgagaggctgaggcaggagaatcccttgaacccaggaggcggaggttgcagtgagccgagatcttgccactgccctccagcccgggcaatagagtgagattctgtctcaaaaataataataataaaaataaataaataaatggagaactccactggttaagagcgaagggaaggattacttctggatttaggagacgaactgctggacaggtcactcgacctgtagagttttgtgcattttggattttgctgattgtataaccccatggtgaggtttaacatgttcctctggaacaggaattaaaagaaattaaagaacgtgtaagcagaaactcagttgtatgtaagaaaacccaatttcccctgagaaaaagaaggagctgaagtcctttaaaaattaactgcctgtttttctgtggctagtgagccttatctctcctcctttcccaggcactgtgaagatcctgtttccctagctgtgcagctgcaaggtcactagacagataaactcaagttgtaaaaaatgtttttccttgaaaagtaaaaaatgatgtaatatatgtctcaattaattgaataaccgtctttgtttctcacttctgtaatatgcttccccctgcacagatctcccccaccccaccaaatgcttaaaaggtaacttaactctttgttcagggctcagtcctttggatgttaatccacctgggctggtgcacctaaataataaagatcctcctcaatcccatcagtctctctgattccttatcaatcctgctaaccctctaaccttatttcctgtaaattagacttataggcctaatcaaattcaggtttaaccttttggcaagaacactttacagatggtactgtgtactcttattagatcacttcagaagacgcatgtttggtttgtgattactttgtaaaaacagtgtagtaggtactcactaaaggaaatttagaaaataataagcttaaggctgggcgtggtgcctcatgcttgtaatcctagcactttgggaggctgaggtgggtggatcacctgagctcaggagttctagatcatcctggacaacatggtgaaaccccgtctctactaaaaatacaaaaattagccaggcgtggtgtcccatgcctgtggtgccagctacttggaggctaaggcagaaggatcacttgaaccctggaggtggaggttgcagagtgagccaagatcacaccactgcactccagcctaggtgacagaggaagactctgtctcaataaaaagaaaataaggccaggcacgggggctcacgcttgtaatcccagcacttcgggaggccaaggccggcagatcacgaggtcaggatttcgagaccagcctggccaacatggtgaaaccccatctctactaaaaatacaaaaactaactgggcatggtggcaggcgcctgtaatcccaggtactcaggaggctgaggcaggagaatcgcttgaacctgggaggcgcaggttgcagtgagccaagattgccccactgcactccagcttgggtgacagagctagactccatctcaaaataataataataagctgcactccagcctgggtgacagagctagactctgtctcaaaataataataataataagcttaaaaaataaaaactttagaaaatacatcaccccagttcccatccctacctgtctatccacaaaaccaaggcattcctgagagtaattcatttattatactaatataacaagtgtttattaagtatctactactatattcaagtactattctaggagatagaaatacagcagtttacaaaataaaacctgctctcacattctagtgtggtagacagttgatgcagaattaaagaatatatgggaataagtgtattaaagagaaaaaataagcagggtaaggggaaacaggtagtgtaatatgtatagggggtaggtgtacatggggggagtcaggaaaggtttcactgaggtgagactagaggacagcttaataatgtaaagaaacacgctatgcaacaattaggggaagagcattccaggaaagagggagcagagaaggcaaaccctgagcaggaccatgcctgtgtatgcaggacatcagataggtcaaggtgctaaaatgtaataatccaggaggatattgtagggaaagagcatcagagaggtagctggtaacttttggtaggaacctgccagctattttaaatctttagctttattctggtctttttaattttctttttttgagacagagtctcactctgtcacccaggctggagtgcagtggcacaatctcagctctctgtaacctctgcctcctgggttcaagtgattctcctgcctcagcctcccgagtagctgggactaaaggcatgcaccaccatgccttggcctcccaaagtactgggattacaggagtgagccaccatgcccggccatctttttaatttttaatgttaattaatttttatagagacaggatctcactatgttgcccatgctggtcttgaatgactggcctcaagcagtcttcctgctttggcttcccaaagtgctgggattacaagtgtgagctactatgtccagtgaaactttttttggggggagatggagtctcactcactctgctgctcaggctggagtgcagtggtgtggtcttggctcactgcaacctctgcctctcggattgaagtgattcttgtgcctcagccttccaagtagctgggactacaggcgcatgctgccatgcctggctaatttttttgtatttttggtagggaaggggttgcaccatgttgcccaggctgttcttgaagtcctgacctcaaatgatccacctgcctcagctgggattacaggtatgagccactacacttagccctaaatgtgaacttttgaaatggattttttgggtaaagtccaggcaggacatcaaagaacaagtatcctggtagtgcgacaagaatgtggttcttttcattaaatatttaactttttagaaaaggatcacaagggccaggtgcggtggctcacactgtaatcccagcactttgggagtctgaggcaggtggatcacctgaggtcaggagtttgagaccagcctagccaatatggggaaaccccgcctctgctaaaactacaaaaattaaccaggcatggtggcacgcacctgtagtcctggctactcgggaggctgaggcaggagaattgcttgaacccgggaggcggaagttgcagtcagatgagattgtgccactgtactccagcctgggcgacagagtgagactccatctcaaaaaaagaaaaaaaaaaagaatcataagaaaagctcggggacagtaaccttattgtgaaggatttagtaatactactcttgtaatcatggtgtttctgacgtagcacagggcagtgaaaagagaaacactgaactaagtcagaaggctgggtttctactaccagttgtgtatataagcagagccaccttgggctaaccactttacctgaacctcagtttccttctctgtcattcaccctgccagtctccttgggctattgcaagaataaaattaaatgctacttgggaaaatacttcacaacctgagatgacttgtaccaatgtgggtattattactgggaccaaatgtgactttaaaaagaaaaacaaccttgacaaagaaaactctgattggttactaaatccctatttctgagataagctacatttcaaagaaattctccgtaaaagaaaaattggattcagttatcataccagatggctttcattctcaccactgactcaattctgaaataattatatttcagtatggtaattataatctacactatataaacacactgtaaacataaactgtgaacagatgaaaactccaatatgtaaaaaggtaatgaatgttgaaggaagactgtgaaaagggaaaaggaaaaaaattaaaatgttccccttctaggtcctgatgagagtaaatgtttactataaaaatgattcaaatattttaaacacttttcaaaccaggcaatattttaggcctactgtatatttgcattttgagcttccaatacggataagtgactggaaaaagcagctaggtttaggttgaaaaacaacaacccaccggggaacacattttagcaaattcttctgaaagtcaaaaatgttacagtcataggtaaaaagttacaaagaactaccaatcgtcagaaatagctgccaatagtgacttagagtccagcagaaggaattttaggtcaagaaacctaaaacaggctgaaaaacttacctaccctatagctaccacaaataacactgtttccagtcatgatcaggaatcacatattaagacataactgcaaattgtgctatactgggtactgtattaaaaggaagtgaaatatggtccccatcctagaagtttccatacatatgagtctaaaaaaccattaaaaattaatcttaaggcctggcgcggaggctcacgcctgtaatcccagcactttaggaggccgaggtgggcagatcacgaggtcaggagatcaagaacatcctgacaacatggtgaaaccccgtctctactaagaatacaaaattagctgggcatggtggcacacgcctgtaatcctagctactcaggaggctcaggcaggagaagcacttgaacctgggaggtagaagttgcagtgaaccaagacggcaccactgtactccagcctgggcaacagagcaagaatccatctcaaaaataaaaattaaaaaaatctgggcgcagtggctcacgcctgtaatcccagcactttgggaggccgaggcaggcagatcacctgaggctgggagtttgagaccagcctgatcaacatggagacaccccgtctctactaagaaatacaaaattagctggcttggtggcgcatgcctgtaatcccagctactccggaggctgaggcaggagaatcacttgaacccaagaggtggaggttgtggtgagccgagatgtgccattgcactccagcctgggcaacaagagcgaaactctgtctcaaaaaaaaaaaaaaaaaatattaatctaacagaaaataggaaaaaagcaatgaaaagctagaaaacatacaatagttgactgaaaataaaaatttagcattaactttcattcttacatctttaatttttatgtatctgagtttttaattgatggtttaatttgccataatgagaaagaacatcctatttttatgactctgtcccatggaaatgtaatgataaatggatccaaatgccacactattgaggatttttttgatcactctgattgtcatgagtaagttgtgctttttcaaaagcagttttttcctacaatgtcatttcctgcttctctggctctgattttcaatgaattgataaattgtaaatcttgttttcctcttgtttttgtttagctaaaatgttgaagggcaagggagaggatggttatttataaatcttgtatctctctgaaaacacaacttgcattttccttaatctgattgacatgactccaaatatgaaaaacaactttcataaagcacaaaagaaaatttccttgaatttacccttttttattgtgggtaagaggcaataggtataaattttcaacttattttttgaatgttactcactattaaccaccatattttaaaaaattaattgaagaactaatgtagtttattatttaatttattcaacaaatgtttattgagtggcaactaggtcccaagtactgttttaactactgaatatacagatgtacataaacgaaacaaaaatctctgctgccctggagtttacattctgtgggactagagataaaggatagatacattacatagaaggtcagctagtaataagtgttatggagaagcagcaggaatggaggataaagtgtgtcttgagggtgttgtaactttaaatagcggtgtctggaaatgaaaaggtggtatttcaatcaagattttcagaccatggctgggtgcagaggctcatacctgtaatcccagcactttgagaggccaaggtgggtagatcacttgaggtcaggagtttgagaccagcgtggccaacatggcaaaaccctatatctacaaacacacacacaaacacacacacacaaattagctgggcatggtgatgcacacctgtagtccctgctactctggaggctgaggtgggaggatcgcttgagcctggcgaggttgaggctgcagtgagctgtgatagcaccactgcactccagcctctcgacagagatcctgtataaaaaaacctctgcatttcactgtatgtaaattatacctcgattcaaaaacaaaatgtggccgggcagggggctgacccccccacctccctccgggacggggcggctggcctggcaggggctgacccccacctccctcccggacggggcggctggcctggcgggggctgacccccacctccctcccggacggggtggctgccgggctgagacgctcctcacttcccagacggggtggctgccaggcggaggggctcctcacttctcagacggggcggttgccaggtagagggtctcctcacttctcagacggggcggccgggcagagatgctcctcacctcccagacggggtcgcggccgggcagaggcgctcctcacatcacagatacttgaaggcagcatgctcgttaagagtcatcaccactccctaatctcaagtacccagggacacaaacactgcggaaggccgcagggtcctctgcctaggaaaaccagagacctttgttcacttgtttatctgctgaccttccctccactattgtcctatgaccctgccaaatccccctctgggagaaacacccaagaatgatcaattaaaaaaataaaaaaataaataaatgtgaacagtacagtccccttttccttttataaatgaagaaaaacaaaggctcactccaagagtcagacttgctaaaggctttgatgatttgcagtattcttatttaaatgtacagagccagcttcagaggaaggttcttccaaagacctatcccctccatgacaccaaccatccatgatttttttttttttttttgagacggagtcttactctgttgcccaggctggagtgcagtggcatgatctcggctcactgcaagctctgcctcccaggctcacaccattctcctgcctcagcctcccaagcagctgggactacaggcacccgccaccacacctggctaatttttttgtatttttttagtagagatggggtttcacctgtagcaggacgagctgcagacaaaactcctcagacaccgagttaaagaaggaaggggtttattaggccggaggcatcagcaagactcctgtctcaagagccgagcccccgccccgagtgagcaattcctgtcccttttaaggactcacaagtctaagggggtgtgcgtgagagggtcgtgatcgattgagcaagcaggaggtacgtgggtacgtgactgggggctgcacgcaccagtaattagattggaacaaaacaggaatgagattttcacaatgcttttctatacaatgtctgtaatctatagataacataaccgattaggtccgggattgattttcaactaccagtcccagggtgtggcgcccgggctgtctgcttgtggatttcatttctgccttttagtttttactttttctttctttggaggcagaaattgggcataagacaatatgaggggtggtctcctcccttattcccccactttgagactctcactcaatagcaggagttgtttcatgtttactacccatgtcttcttgctagacagatcaatagtgatttatatagtacacttgtgctgatgcattttggtatactaaggtagcgatgaagctttttatcatttgaagaagtacaggtagcaaacgagggagcagtaagtaggttcctattactattataactcttattataagagttttaaatcctcctagcgctgggaaccattttctaaacatggccccaggatcaaatccatgccacacttgcacgggcacatgtgccacttttgtcatatctctaactatgtcttcaactacttgcccttggttatctatgtgtaggcagcaattagtaaggttaaatttcctacagacctctccttcagctgctagcaagtagtcgagagctaatctattttgatagatagcatttctcatctgagtttcttgctgggccagaatagtcaaggctctgccggttgcagtgattatttttaagacagcttgtaaccgtatgattcagttgatcatataaatggggatccggtatccccacgagccatcttgtgcctaagtagcaggcccataatactgtatgattctctcagggggccatttatcattgtttcaatttcttatagctatgcttttcacgggaagcatagacagggaagcccaggagttctcctgtttttatggacagtaggaagaaagatggtttaatagtgccaataacacaactacttgtcaggcagcttagtgtaggctctatgtccacatatccagtatagcccagtgggggctgtccagtcccggtgggattctgggtgggcctaaacggtctgcaactttggaaatttactgaatggatttttctctgtgtggtttgaactccaccatgtagtcttcctacaggaagggtgaagtccttctccactcttgctatatagtattgtctaatgattgaggcttttaggacccagaaattatcagggtgattcttttgagctgggaattcatcaggaactgggtctgtaggtactaattctcgggcttcccatggccattgatctgctattacagttcctccacatacataacatgaagtgacagtgagagactgggctacatgctcggctaattgcaaaaacaaatttcttgtttttcctggaaattctgttattggcacatttagttcatcatagaaagtttgaaacactggctcaagagagcatttgtaaacttctcctcgaaccaagatatttactcggggattcagtccagccccattgattcctaaggtcacacgctactcttttttccagcgaggatcaaggggattggttattactagctctaaggggttacattgtcccttagcacaggaagggccatttttttcctttctgaaggtggactggatccttttcattttttttaaatccaagtggcctaaatgacacaagaccagtatttacatttatttccacacagtcctaatttatgacagatgtacttattttctgccatatagcctcttttctaattaagagaaccacactttattcctaacttattactattaatgacagcacaggcatcaaattttaaggtgacttgtttgggcacccctttttcttctgttttggctaacactttactcatatcatttatgagcccccaccagtcctcagtccttaatcttattttaaaaaccgtggtcatgggaggctcagatgggtcataacacacatcaggttggtcacttcctgggctacataccttgtacagaataacattatacaaacaagttatttttagagttccagtacacttataataaccataaaataataggactgtagcaaccttttgtcctacctcagtgacttgatgtatacactggaacagtcctcagtctgaggaaggtcagttgaagtccttactgtaaaagtccaaattttaaggaaaatgagttccgcaatgagttttctcatgcttcggccgtgcgtggaccagtcagcttctgggtgtgactggagcagagcttgtcgtcttcttcagagtcactttgcaggggttggcgaagctactcccgtccacgtacccctcacagtctactgatgtttaaggatagtctcggaggttgggcctgctagaataaactgagtccaacacctctacacagtatgttcaactaggctctctgataccaggagcaaggtggtggggtttagggtgttgcaaacttcagtggttatgtggggattttcacatagcaagctttggtacttggttaatctagcatttgtaaccaatgaggtcctttggtagtcattaaagttaccacagcatggggggcctttatattcaggttttcctaagggttagtttatctgcttcttgtgctaacagggctgttgctgctagggcccttagacctgggggccagcctttggaaatcctgtctagttgttttgagagataggccactggccttggccagggcctcacagtatgggttaaaactccaactgccattttttctctttctgacacatagagtgtaaagagttttgtcaggtcaggtagcctcagggctgggaccaacatgaggttttcttttaactcatgaaaacctcgttgttgttggttgtaatagatgtagtttatctaatctacatttttattaactgtcacccactaaaatattgacttaaatcctgcagctatttgatttcaagctttaaattgatctggtattcttcgtgggactccaattgcatctaaatagacatgagagtcgaaagacccataaggggcttctctcgctttacaatgtctttctttttttccttctggttgatgaaatgccagggtgaaagggatagccaattggactaaagtacaagtgccactccagttatttggcagagtgcccagtaaaggtccaccacaataccaccacacatctgctcggggatgaacaagggctgactgattgataagctcttgaaaattcttaagctaactgcatcctttcaggtctccaaggaacgctaagtttcctccctgttgtgagagacatgaagtgaacttagtgttgggagatggaggatggatggccctcgggggctgacccgcagggtgctggactttgggatatagcagagagagcttggcatgacttattaatacaggctgtagaatcctggaaaagagctaccaggcagcccacatctggtcgactggaggaccaccttagtggaaaggggacaatctgggcctctggcctgccatgtgcacaagcataacaattgcttttgtttaacgtgcagatggaatatttgatgcattttaaccaggcatttgcatcttggtatcctgtcttcattggtaaagtttgttttaactctttaacttctatgatcctctagtaaaacgaatgtatggttttaggaaattacaaaaactggttggggcagtccattcttgctctttagtggtccacagaacgttggaccaactacggcataaaaactctacatcaggggacaagactcctggttggcactggggtctttatcgaaatctccctggattaaatggtcctagtttactaatgtccagtctgaggagagtcaggagggacagaagtacttttctgaagtagagagctgtctttgacttggcaagtccccacagggtataacaaggcaagcattaaatgcaatagtttgaggtgaaattgacttggttatgttaataactagatggtcagcaatagcacgaggaaagaaagaagagtaatagaatagatgaaaagagatttttcgtagctttagtttggcagggttttcctctgggactgtggcccatgactctggagggggtggcactttcttgattctggtgtgacgagtccatccttttttgctgtacgaacagcagtcttggtggttagcaacacaaggtagggtccttccaggctggctcgagtttttcttctttccacctttcgatgagaatgtgatcttcaggctggtgctggtttactagaaattctaggggtggtacatgtgctaaaagacttttagtttttgagagaaaggaaagtggaaaataaaccaagcatataattctaaggaactgaccttttgttttaaatgtggggaccttggcagtggactttatagtccttagtgcctttttcctgagaaatttcctttagcacctatttttattagtttttaaaccaaagaaagccaaataccattttacatttaacagtgcttctcgtatgatttttataccagataagctaaattttatctttatattagtgtgttattaatattaaacttaattttaataaaaccttgtagacatatgtatctaattgttaatgtttgaccataaggtaagattttatagattctttttaaccctttataatttttgcaaaagagcaggttggtgctttaagaaaaaacctgttatgcttttactttaatgtccagttcacagaaaaactggatgatacttctttaactttagctaatatgtttacacacagaattttctttacaattaacattttgaaacttgcttaaatcttcaaaacaataattatttttaaccttttaatgtaggtgaaaatgtacatccttatgcctccttacaattcttttaccaaagatatattttacttttcttatacaccttgcatataaactgttttttttttcaacagttttacattcaggaggcctagttacttttaaattatacaacattttttgcataaatttttttataacatttttctctttcgtgactttcgcagacaattcttcgatatgcctcaactttctgacttattacaaatatttatttctttaaacaaccagttaatttgtttcaggacaagaatttaccatataatactctttttatataaattccgccccccctttttttccttttttttttcgaagatgataaccattcttttccaaagcgaaccttttttgtgtcttgtggactaggccacaagaatataagttactatatacatgttacactgttaacttttagcaaactttagttgaaaacctttaaaaaaaattttaaaaaaatgcatgttgtgcacatgtaccctaaaacttaaagtataataataataataataaaaagaaaaccttctaagtttgggattttaattatcctttgctattaataagaccttgttttgtctaaattagaattggtatagatggcttttttttcttaactttgtatctctctctctttctctctttctttctctctttgactttgtctctctctttgactttccttttgcctctgcctcttcctctctctctgtgtgtgtgtgtgtgtgtgtctctctctctctctctctctctatccttgactctctgtctgtctcttcctgtctcttcctctctctcttttcctcttttcctctctgtctctttcctttctctctctctgctggtctttccttgcctctgccagccacttatgctgctgttctctcaaccactatgtgttgggggtggggggtctaaaaccagctctaatcaagtgtctctgtaagggaactggtctgggttccttggcttataggttaccttgtgccatacctttgaaacaagggacctgtccaggcttccttctaatggccaacctacctctaatgctggccagtctatcttacacaaagttttaagttttcctggtgtcatagcactccatagtctccctcagattcttttttgaaatttgtcaacatagttcctagtggggtgggcttattcgtgcctgacctatgcttcttcaagacaaaacaccacgctcacaccacaaacacaccacaaaacaaagaaccggtaaaaagggcgcacacacagttttgcagtttgcaccaaaccaaaatcagagtatccagaaatccaagccaggtcaaaaccaaaaccaaagtatcaagcaatccaagtcaagtcaaaaataaaaaccaaagtgccaggagaggcacaccatgggtgatcaggccacacttccactcaaatggagtaggcaagttcccaagaccaatcctgtcaagcaattcaaaccaaaaccaaagtgccaataaaggcacgccatgggtgatcaggccatgcttccactcaaatggagtgggcaagtttcaaagactactcttaccaagttttagatgtccagactccaagtgcccgttccttcccggtgttcagccactgcgttgatcctccatgggggcctgccatacagtgctctggcgaggcgtcccagtggggcaaatgcctaaccaggagcgccctcaggatccgtgttgctcgggctggttggagtcccctgcagggatgttccacagggcaggtttaagccgcctaaggagctgccttgaccatccgccattcacctcgcttcccagtcagggaaccaagaaatcgagctgcagacaaaacttatcagacaccgagttaaagaaggaaggggtttattaggccaggggcatcggcaagactccggtctcaagagccaagctccccgagtgagcaattcctgtcccttttaagggctcacaactctaagggggtgcacgtgagagggtcgtgatcaattgagcaagcagggggtacgtgactgggggctgcatgcaccagtaactagatcggaacaaaacaggaaaggcattgtcacagtgcttttctatacaatgtctgtaatctatagataacataccaatcaggtcaggggttgatttttaactaccaggcccagggtgtggcacctggggtgtctgcttgtggatgtcatttctgccctttagtttttactttttctttctttggaggcagaaattgggcataagacaatatgaggggtggtctcctcccttacaccatgttagccaggatggtctcgatctcctgacctcgtgatctgcctgcctcggccccccagagtgctgggattacaggtgtgagccacagcccccggcctcattcatgatttattttgccatttcaagtgatggagctggttttagagctagaagaaaaccaaaatgccagttaatctaaactagattcctgccccagtgcagaaccaatcaagacagggtccctgtctttcagggaccacaggatttgtgttgaagaggagaggagtgggagaggcagagtggatggagaacaaggattcattttctatacttttaaagttcttcagttaagaaaatcagcaattacaatagcctaatcttattagacatgtcttttcctcccttctatgtaaggtcaattctgttcatttgcataggagataatcatataggaatcccaaattaataccctcttctggtgacttaccagattggacactgtaagattttctgcatagcattaaggacattttgtacttcttcaacgcaaacagcagataaatctatctctttctgttccaatgaactttaacacattagaaaaacatgtatcttttaaaaaggtttagaaaaatgacaacttcattttatcattttaaaataaggtaaattgggctgggcgtggtggctcacgcctgtaatcacagcacttagggaggccgaggcgggcggatgacctgaggtcgggagttcaagaccagcctgaccaatacggagaaacctcgtttctactaaaaatacaaaaaaatgagccaggcatggtggtgcatgcgtgtaatcccagctactcgggagctgaggcaggagaatcgcttgaacccacgagtcagaggttgcggtgagcccaaatcacgccattacactccagcctgggcaacaagagcgaagctccgtctcaaaaataaataaaataaaataaggtaaatttaagatttggaaggttttagaataatacaaaatcctttaaaggttctagaagttgctttttgtaattagacaatataaattctgtattttttcacatattgcttccaaccctttgggtcttttcctttctccaagaaagagaaagctacaggggagtgactgaccgggtaagtggtgagctttctccaatgcttctggctgttttctttttcttgcataaaaccaaaatcaacaacgaccaaaccaacaccaatcaaggcctccctgcccctagcctttcccagcgacccactctcatctcaggatccccctcaagcacatccctgccggcagcatctgttactactgacgctcctctacttccctcttgcgctttctcaatagcacaaatggatccagttcttaagttctccctcccacaaaatcctgtctcctccccttcccagacatattcctggcacttcttcttccgcaagggcccatcttctcatatataccagccggtgtttatttctttgtttgtttttgagacggagtgtcgttctgccacccaggctggagtgcaatggcgcgatctcggctcactgcaacctccgcctcctgggttcaagcgattctcctgcctcagctcctgagtagctggcgcgcgccaccacgcccggctaatttttgtatttttagtagagacggggtttcaccacgatggtcaggctggtctcgaactcctgacctcgtgatccatccgccttggcctcccaaagtgctaggaatacaggcgtaagccaccatccccggcgaccagctgatgttcttatacacatggtgtccccttcaaggcacattccagttcctatcaggaggattcctcctcggacacactgtgcccccaacctgatccttagtgcttccctcgagacctacaaactgcccccttccccggggggttcacaacgccttatgcctctcaggttccgcccccgcccctcgcataagaatacccatctgcctagcttcggaaattcactttcccccgcccgtcccccggagcatcccttgggcccctgtccctttcccggggctcttctaccttaacccagagcagagggtgcaggcctcctgagcccaggggcccagttatctgagaaaccccacggcctgtcccccgtccagaacgtctcagcgagctcacgacgcgcagtcacgtttttttccccccctctacactgcagatgtggctcccaatgttgacgttggccaggacctttgcaaacaagccaggccaaaaagtttcaatatttacactggctgctttaataagggcattgatcttatcctccgtaaaggtcacctcatagtcctgcagaatgagggcagagtagatgcaggcaagctgggagacggaggccatagcgcgggcgagtgtggggctggggctgccggacgcggtgctactcaccggatgaagtgagggtctcaccccaacgcggccttagcttcctcggaaggaccgaacaccttggcggcagccgaggaaaggggttccacagttttaatttatctgtaattcccacgctttactgttgccacggaaaccgctgagcaatagcctctcagaataggaaatcaagacacagtcagaggaagggcgggacagaaag

SEQ ID NO: 30 - DNA, 84761 bp, Homo sapiens
  source 1..84761: mol_type = genomic DNA; note = HGNC Approved Gene Symbol: BRCA2; note = Cytogenetic location: 13q13.1; note = Genomic coordinates (GRCh38): 13:32,315,508-32,400,268
agaggcggagccgctgtggcactgctgcgcctctgctgcgcctcgggtgtcttttgcggcggtgggtcgccgccgggagaagcgtgaggggacagatttgtgaccggcgcggtttttgtcagcttactccggccaaaaaagaactgcacctctggagcgggttagtggtggtggtagtgggttgggacgagcgcgtcttccgcagtcccagtccagcgtggcgggggagcgcctcacgccccgggtcgctgccgcggcttcttgcccttttgtctctgccaacccccacccatgcctgagagaaaggtccttgcccgaaggcagattttcgccaagcaaattcgagccccgccccttccctgggtctccatttcccgcctccggcccggcctttgggctccgccttcagctcaagacttaacttccctcccagctgtcccagatgacgccatctgaaatttcttggaaacacgatcactttaacggaatattgctgttttggggaagtgttttacagctgctgggcacgctgtatttgccttacttaagcccctggtaattgctgtattccgaagacatgctgatgggaattaccaggcggcgttggtctctaactggagccctctgtccccactagccacgcgtcactggttagcgtgattgaaactaaatcgtatgaaaatcctcttctctagtcgcactagccacgtttcgagtgcttaatgtggctagtggcaccggtttggacagcacagctgtaaaatgttcccatcctcacagtaagctgttaccgttccaggagatgggactgaattagaattcaaacaaattttccagcgcttctgagttttacctcagtcacataataaggaatgcatccctgtgtaagtgcattttggtcttctgttttgcagacttatttaccaagcattggaggaatatcgtaggtaaaaatgcctattggatccaaagagaggccaacattttttgaaatttttaagacacgctgcaacaaagcaggtattgacaaattttatataactttataaattacaccgagaaagtgttttctaaaaaatgcttgctaaaaacccagtacgtcacagtgttgcttagaaccataaactgttccttatgtgtgtataaatccagttaacaacataatcatcgtttgcaggttaaccacatgataaatatagaacgtctagtggataaagaggaaactggccccttgactagcagtaggaacaattactaacaaatcagaagcattaatgttactttatggcagaagttgtccaactttttggtttcagtactccttatactcttaaaaatgatctaggacccccggagtgcttttgtttatgtagcttaccatattagaaatttaaaactaagaatttaaggctgggcgtggtggctcacgcctgtaatcccagcactttgggaggccgaggtgggcggatcacttgaggccagaagtttgagaccagcctggccaacatggtgaaaccctatctctactaaaaatacaaaaaatgtgctgcgtgtggtggtgcgtgcctgtaatcccagctacacgggaggtggaggcaggagaatcgcttgaaccctggaggcagaggttgcagtgagccaagatcatgccactgcactctagcctgggccacatagcatgactctgtctcaaaacaaacaaacaaacaaaaaactaagaatttaaagttaatttacttaaaaataatgaaagctaacccattgcatattatcacaacattcttaggaaaaataactttttgaaaacaagtgagtggaatagtttttacatttttgcagttctctttaatgtctggctaaatagagatagctggattcacttatctgtgtctaatctgttattttggtagaagtatgtgaaaaaaaattaacctcacgttgaaaaaaggaatattttaatagttttcagttactttttggtatttttccttgtactttgcatagatttttcaaagatctaatagatataccataggtctttcccatgtcgcaacatcatgcagtgattatttggaagatagtggtgttctgaattatacaaagtttccaaatattgataaattgcattaaactattttaaaaatctcattcattaataccaccatggatgtcagaaaagtcttttaagattgggtagaaatgagccactggaaattctaattttcatttgaaagttcacattttgtcattgacaacaaactgttttccttgcagcaacaagatcacttcattgatttgtgagaaaatgtctaccaaattatttaagttgaaataactttgtcagctgttctttcaagtaaaaatgacttttcattgaaaaaattgcttgttcagatcacagctcaacatgagtgcttttctaggcagtattgtacttcagtatgcagaagtgctttatgtatgcttcctattttgtcagagattattaaaagaagtgctaaagcattgagcttcgaaattaatttttactgcttcattaggacattcttacattaaactggcattattattactattatttttaacaaggacactcagtggtaaggaatataatggctactagtattagtttggtgccactgccataactcatgcaaatgtgccagcagttttacccagcatcatctttgcactgttgatacaaatgtcaacatcatgaaaaagggaaatgattccatagcgttattatgaaagtagttttgaactgtaatggtagaggatgaatagctcacaatacaaatttgtcatttccctttaagagagaattcccattttatgtgagagtccacatgttcctcatacccatagtttgccacatcttgagtactcttcagaattatttgaattttttgaattttatctgtggaatgtatttttttttttttcttttttgagacacagtcttgctctgttgcccaggctggaatgcagtggcgtgatctcggctcactgcaaccaccgcctcctgggttcaagtgattctcctgtggcagcctccggagtagctgggactacaggcgtgtgccaccatgcttggctaattttttgtgtttttagtaaagatggggtttcaacgtgttagcaaggttggtctcgatctgacctcgtgatctgctcgcctcagcctcccaaagtgttgggattacaggcgtgagcccccgcacctggccgaattttatcgtggaatgtattcttaatgtgaatagtttttgattccgaaccatgaataataagaaaataaataaaatttaaatgaaaataaaagctaatatatacagcttttaataatatagttaaatgccatcttgtaacttttgtgaactcttgttacacctttctatagattcgcaagagaatggattaatgatcttgtttaattaatatgccttaacaaaagtaatccatagtcaagatcttaagcatttttttccttatgatctttaactgttctgggtcacaaatttgtctgtcactggttaaaactaaggtgggattttttttttaaatagatttaggaccaataagtcttaattggtttgaagaactttcttcagaagctccaccctataattctgaacctgcagaagaatctgaacataaaaacaacaattacgaaccaaacctatttaaaactccacaaaggaaaccatcttataatcagctggcttcaactccaataatattcaaagagcaagggctgactctgccgctgtaccaatctcctgtaaaagaattagataaattcaaattagacttaggtaagtaatgcaatatggtagactggggagaactacaaactaggaatttaggcaaacctgtgttaaaatcttagctcattcattaattgtgtcatgctgggcaaatcagtctctctggcctctttttcctcactcgaaaaatggagacgatgaaaataatgtctcataggtttggattaaattaaataatgtaggtacttagtaaatgttctctttcatccctcctttgataaatttgccaactgagatttgctgaattacgtctttcttatgccaaaaaaacctaggacttgttttgatgttaattaaactaaactatatttctgcaagctatcacagaggacagagattattttaccgatatactataagtatcatgatttggaaggagtttccctggcgtaggtgccgcatgtttctaagcaattatgtaataagattatatattcagtcattcaaataattattacctacttgacataagtaatgaactttcccttttcttcagagtgttaatctctagtaaggggaataaagagtacacagataaagtatagtgtaaggttgaatgtagtatgtgctaagagaaaaatataaaaaagtataatgagagttgagaagaaagagcaaatagtattgggcaaagttaggcaattattcctttgagctaaaccttgaaggataggtgagagattaagaaatttgaagatgtggtagagtgataatgttctaggcagagggaacaacatgaggaagaatatgtagtgtgttcaggaaatagcaagtaattcaggttggctttggttgttttgtgtctgaaagggaccaatagacaaggcaaaaaggcagactaaaggcaggcattgaatgccaagctaaagaaattgaatttgtttggttggttggtgagcagagaaatcacatgcaaatttcatcatgctacttattgtgtcaaaccttagatcacctccctttgtccttatagcaaaatctaaacttgatatggctttcaagttcctttgtgatcaggcccctgatttacactcttggctcagcttgccatattcatcctctcacctatcttcatttgccattcattcctactgaatttcttttcgttaccaaaaccacaatgctctctggctctttattaaacatattgttacctctacccacaacctactttttccctactttttgtctagctaatttgcgtgctcgtctttcagatcttggcttatttctgcttctgagaaatacttcctgtctgccctcgttgagcttctagtgaaggagacatacataagcaattatagtgtgatacatgctttgaaagaaattcatggctatagggagtgcatatacaaagggaatataggtaatgggcaaatatttacatgtatgttattggataccaaatggtatacataggattcagtaaatatttgtagagtgagtattagtattatttgctttagaaagcctaatgatcaaacagcagtctttggagataacgtttttcaaaatgtcatgtctgtgccattagaatcttctagactgctcattgaaaggacagattccaggccccactctgaatctcttaatttataatttttggaaatgatgcccatgagtctacattttaaactacctgaatgatccctatagaaagagaaaactggaggtaggaagatcagttaggggatgtgtaatggtctaggtgatagagacaagtgcctgaattacagtaataacagtgaaagtaaatatggaacataaaactataggaccttgcagtagtctagatatggaggattcaaaaaaaggaacaaatgacagggcaaagcatatgcagaacacagtagtaacagtcatagaaatggataagggagtcatccattctgcaaatacttagtgcttacttgtgtctggcaacctgctcggcattaaggatacaaatatgaataagatgtcctttgacctctaagtactcagtctcgtaagcacgtcttgtaagcacatcttggttgcttccataaaaataaatacactagtgtgatatgttataagagcatgtaccaagtgcatgaaaagtgagcagccatctctggttggtcagaaaaagctccataaagcagtttttgctgaatcttgaaagatatacctaaggtcaaatggttaattctttaatcataacctgctagaattgatctataaccaaggaaggatagtaaggaattaataaggccactctcaactcactgcaaaggagttaactttttgaaggctgtaatacataaatctgctgactagtctcttgagaccttttgcttttacgtttactttagattcagtattgaaaagtaagagtaatggacttaagctgtgtttttcaacctgttttgttcagttctaacatgtaatattttttaaaaaattattcctaaagttctatgaggaattgtgctgtttctgcctctcagcagtccttccttttgcattaaatcataggcatttctgttaccattcttcagcttattaatgagatcctcaggttatttgggaaatgtttatttggtaattaactctttttcacctagttcatttttttaacttttttttttaaatagccgagtttcttttcattgctgaactaaaatggatgtgttattattagctgaactccttagtttactttagagttcaccctttgtatggttctatggattttgacaaattgtataatgtcgtatatctgccattatggcattatacagaataattttgctgccctaaaaatctcccgagttccacctgctcacccatccctcctcctgagcccctggcagccactgatctttttactgtctgtatagttttgccttttccagaatgtcatgtagttggaatcatacagaatatagcattttcagactggcttctttcacttagcaatatgccgagaccagctcgattgtagagaccctaacccagcggcactagaggaattaaaggcacacagaaatatagcggtgtggagtgggaaatcaggggtctcacagccttttgacagcaagccagtgataagcattgtttctatagattatagattaactgaaagtattccttaggggaaataaagggctgggccgaagtaaagggatgggtctggctagttatctgcagcaggagaatgtccttaaggcacaggtcgctcatgatagtttgtggtttaagaacgcctttaagcggttttctgccccgggtgggccaggtgttccttgccctcattccggtaaacccacaagcttccagcgtgggtgtcatggccatcacgaacatgtcacagtgctgcagagattttgtttatggccagttttggggccagttcccaacagcaatatgtgtttaaggttcttccatgtcttttaatgatttcatgctgaataatattccatcgtattgatgtaccacagcttgtttatccattcatctattgaaggacatcttgattgcttccaaattttggcaattatgaataaagctggtataaatattcacatacaggtttgtgtgtgaatatattttcaactcattttggttcacaccaaagagcacgattgtgggatcatatagtaagagtatgtttagttttatgagaaactacaagctttcttccaaagtagctgttgcattttgtattcccaccagcagtgaatgagagttcttgttgctcacatcctcaccagcatttggtgtgtcagtgttttgaattctagccattctaacaagtgtgtagtggtacctcattgtttgttttatttaattttttttttttttttttggagatgaaatctcgctttgtcgcccaggctggagtgcagtggcgtgatcttggctcactgcaagctccgcctcccaggttcacgccattctcctgccttagcctcctgagtagctgggactacaggcacccgccaccacacctggctgatttttttgtatttttagtagagacggggtttcactgtgttagccaggatggtcttgatctcctgacctcgtgatccgctcgcctcggcctcccaaagtgctgggattacaggcgtgagccatcatgcccggcctgttttattttttaaagtcaattttctttcaagaattagctactttttagtatctttaattaaaaatctcattagagaaggaggttggatattttgttgaagtggggtttttaagttacacatccatttgctttattagtgattatgtctagtccatgttaacttgaaaaatgagactataatgagacattttatttaggctgctacaaacagttttaaatttggtcttcactttattttagtaacattgatagagcttatttttcccaaaagctaagttagagattataggaccaaccgaagcaactattttctaagagtaataataagtgactcaggtgccaaatttgtagttaccatcaactattggaaccatatgagtacttaatgccctggagagtcaaatataatctactctaatacagaaaatagaaatattgaaaaactgtaaattggatttcatattgttaaagccacctatagctttagaaactctgaacattattttcttagaaaatggatgtgttcaataagaatagaaattatgtattactgtctgcaactcactttgtctaattatatccaatttattcatccagtcaatatttcaggagtgactaatataccagacatttttgtagttgctagggatacagtgacaaataagacaaaatctctacctcagattgctcacagcctagtagggggaaaaagaacagtgtatgatcaaactcttcagggaacacataggggggcaaacacttaatcttaccttagggatcactacagttttctggaggaggtagtttctaaatggaagcctgaaagagttgttccaggtcaagaaaagcaaagaaggggaaacagcttgtacaaagtcctagaggttaaagaaaacattctttcaggatatgcaaatggttgggtatgggtaaaaagtagactgtaaaagaatggcatcataaaaattaagtaaattgtcacataaatatatatatttcttatgtacccacaaaaattaaaaatgaagaaattaagtaaattgtgaaaggccttcatactatggagtttgacttgatcttgaaaagtaagatcttgaaaggtttttagcacaagtgatattgtcagatctggtacattggtaggttttcagtaaatgtcttcccttactccttttttctctttccttctgcttttgtttaaagcgacaagatgttgctcttttcccaggctggaatacagtggcatgatcatagctcaagctcctgggctcaagtgatcctcccgcctcagcctctcaagtagctaggactacaggcatatcaccacaccagcgttttctttgtagaggcagagtctcactctgttgctcaggcaggtgttgaactcctgcctcaagcaatcctcccacctcagcctcccagagccctcaaattataagccactgtgctcggggcatcctttttggggggtaatcagcaaactgaaaaacctcttcttacaactccctatacattctcattcccagtatagaggagactttttgtttttaaacacttccaaagaatgcaaatttataatccagagtatatacattctcactgaattattgtactgtttcaggaaggaatgttcccaatagtagacataaaagtcttcgcacagtgaaaactaaaatggatcaagcagatgatgtttcctgtccacttctaaattcttgtcttagtgaaaggtatgatgaagctattatattaaaatatttaaatgaaacattttcctacatatatttgttctataaagatgaatctgatttttatgctaatattttggctaagagcctggtagaagatcttacatttttaaataatcttttaggttgagtcctttaatagaatagtttttacattagaaacatgtaagttgttgttcttgtgatgttgaattggctggttttctgtatattctgtgattttttaagtaacaaaaataacagtggtgaaaagcagtaagtcagtccttgaattatcaatttaaaataaattgtgtacttttcatctttggagagaatatgatttactttacaaattttttttttgttttttttttttttgagatggagtctctgtcacccaggctgtagtgcagtggtgcgatctcagctcactgcaagctccgcctcccgggttcacgccattctcctgcctcagcctcccaagtagctgggactacaggcgcccgccaccatgcccggctaattttttgtatttttagtagagacggggtttcaccgtgttagctaggatggtctcgatttcctgacctcgtgatccgcccgcctcagcctcccagactgctgggattacaggcgtgaaccactgtgcccggcctactttacaaaatttttgagtttaaaatacacggtttccagcagctgaaatttgtgagtacatatgtgttggcattttaaacatcacttgatgattatttaatgcttcatgagagatttactttttaaaatgtaatataaaatatctaaaagtagtattccaacaatttatatgaatgagaatcttcttttaaaaataagataaactagtttttgccagttttttaaaataacctaagggatttgctttgttttattttagtcctgttgttctacaatgtacacatgtaacaccacaaagagataagtcaggtatgattaaaaacaatgctttttattcttagaatactagaaatgttaataaaaataaaacttaacaattttcccctttttttacccccagtggtatgtgggagtttgtttcatacaccaaagtttgtgaaggtaaatattctacctggtttatttttatgacttagtaattgagaatttgacaatagcgttatacctttgccctgagatttacaaatctgtacctagcattctgcctcatacaggcaattcagtaaacgttaagtgaaataaagagtgaatgaaaaaataatatccttaatgatcagggcatttctataaaaaataaactattttctttcctcccagggtcgtcagacaccaaaacatatttctgaaagtctaggagctgaggtggatcctgatatgtcttggtcaagttctttagctacaccacccacccttagttctactgtgctcataggtaataatagcaaatgtgtatttacaagaaagagcagatgaggttgataattgtcatctctaatacttctgttaaaaggaaatatgaaaagaaaatattagataatgtctttgataagtgtgttagtaactgacaataattttattctattaagtgtagattggaataaatacaaatacatttagtggtagtccagtggtgtcaagcattatgttttagtacgatgtgattaacgtagaatagcttacaaatattcctttactggcctatataagcgtttaagaggcagtatttggtgtgactgaattctttttacaaatgattgtggtaattggggcattaaagcagcattaaataagcttttgttttctctacttaaatgtgttctaaggtctgtattgccagtagtactgaattgaggtcttaaattccacaagtgtaattacacaactatgtgataaactgcaatatttatccattcattaaactgtaaactctttgcagtctcaccacagtttctcttactaggatctagaaatatttcctattgtaggctggttgcagtggctcacgcctgtaatcccaacactttgggaggctgagaagggtggatcacgtgaggccaggagtttgagagcagcctgtacaacgtggtgaaaccctgtctctactaaaaataaaaaaattggccaggtgtggtaacacacacctgtaatcccagctacctgggggctgaggcatgggaattgcttgaacctgggaggcagagggtgcagtgagccgagattgtgccactgcactccagcctgggtgacagggaggctgaggtgggaggatcacgaggtcaggagatcgagaccatcctggctaacgtggtgaaaccctgtctctattaaaatagaaaaaattagctgggcgtggtggcagacacctgtagtcccagctactcaggaggctgaggcaggagaatggcatgaacccgggaggcggatcttgtagtgatctgagatcatcacgccactgcactccagcctgggcaacagagcaagactctgtctcaaaaaaaaaaaaaaatcctgttataaaactacttaaaaatctctgagtagctgagatttggctaatcatgacttagtatttgaaaagttgtgactattttttttttttttaattgagacaaggttcttctctgttgcccaggctggagtgcagtggcaccgtcgcagttcactgcagcctcaacctcccaggctcaattaatctttcttcctcttagccttccaagtatctgggactacaggtaccatgccaccagtatactaccagtcctggctaattttttttgtattttttgtagagatgggtcccgccatgttgcccacacttgtctcaaattcctgagctcaagcagccaccacacccacctgtgaccattcttttttatttttatgagataataaacatacaagtttaaagaaatgtctgtacataaatgtgattatagtacaaacaagtatttggaagttcatctaaacaaatgcatcacagtttataggcaaaacatgaaagattggataataatgggaaaaaaagtaaatattcaccaacattctttctcttttttctttttcgttttttttttttttgaggcggagtcttgcccttttgcccaggctggagtacagtggcaccatctcggctcacagcaacctctgccttctgggttcaggcgattctcctgccttagactcccgagtagctgggattacaggcacccaccaccacgcctgactaatttttgtatttttagtggagaggaggtttcactgggttggccagggtggtcttgaactcctgacctcaagtgattcgtttgtctcagccacattttttttgtctaagaagatactgggccagatcattgtttctcaaattgcagattatgacctgttcatagttgtgaaacttattttgtgagtcgtatatgctctttttaaatgaaatgaaaattctgagtacatcacatgtagttagggtttagaaaataaaaaatacaatatatctagttaaatttggacttcaggtaaacagcgaataattttgagatatacttaacactaaaaaattattcattgtttatctgaaattcaaatttaatgaggtgtcctgtattttatccagaagtcctacacacagtaaagtttgttttgtaaaacttttttacttaacctttgtgtgcccatgtgtgtgtgcagtcataaagtgtgtgtgtgtgtgtgtatttaaaaaactaggttgtactcaaagcctgagcttaatttattcccaaaccagtattacattttgtttattctagcaaaatagcattctgttttgattcctctttagctgggagtaagttaaccctattctgttgcttagatgaaataatatggataaaatcattttgaaaatatgtatttaatatatagtatgcctttaggctgtagtgttgtctaaatgaatgctaaagtctccaagctttagcttttaagtcataacctcacagcatcatctgactttccaactcattgtggacagtattaccataaagtaatgatcaccaagccatatcttaccaccttgtgagtagtactaaggaagtaagtatagtttattcactgtgttgattgacctttctaattactatacttaagtacttgaatcaattcattttgtttcaaatgtgtcatgtaatcaaatagtagatgtgctttttgatgtctgacaaaaaataagtttttgcattctagtgataatatacaatacacataaatttttatcttacagtcagaaatgaagaagcatctgaaactgtatttcctcatgatactactgctgtaagtaaatatgacattgattagactgttgaaattgctaacaattttggaatgccttgttaaattatttatcttacatttttaatttcctaatctgtaatttatctaagcctttgagaaagtctctaaacctggtcctatatgtgattttaacttcctgtgaaactctgctgtctctctgttaaagttgcatatatacaatatataccgtagtcccctattcatggggtatacattccaatatcccccagtgaatgcttgaaaccttagatagtaccgaaccctatatatatatattaaaaatgtgtagtatttatatatatatacctataatctttttttctataagcacataccctgtgataaagtttaattcataaattaggcacagtaagagattaacaagaactaataataaaataggacaattataacaaaataccgtaataaaagttatgtgaatgttgtctctctgtctcaaaatatcttattgttctgtactcatgtggcagcagcttcatcagcagatgtggcctctccagtaatttttatatttttcagtccaaacctattcttgaatctgtgtaaccaaccatcccttacttgcagtaaatggcttggtgtcattcatttcaggggatcccttactgaagttttcgtttaggctctatgctttctggcgtaatatgtagctgtcaatcaaaacaacctgttcatgttttctacccacaaatgtaataccttttctacttctatggtgcactgtgtggccacaacatttgcagtttgaggtgtgacagcaaaaccagctcatatgtctttctccttcacaatctcacagatagatttgttcttaccatagatgtcgcagtacaatttttttcctttccttaagtcgagaactttcactgtttcaattaaaggaagcactttatggcttctttttggcatatttgaattgccagcatcattatacttgtgctttggggccattgttaagtaaaataagggtgacttgaacacaagcactgtggtaccacaatagccgatctgataaccaagacaactactaagtgactaataggtgggtaccatatacagcctggatacgctggacaaagggatgattcatgtcccaagtgggatggagcaagatggtgcaagtttttttttctccatttccattttcctttcctaagatttccacatcctagtggtgcaagatttcatcacactactcaggatgacacacaatttaaaacttactaattgcttacttctggaattttccattaaaaatttttggacctaggttgattgcagataactgaaatcaccaaaagtgaaaccatggataaggggggactactactatatgtgcattgagagtttttatactagtgattttaaactataatttttgcagaatgtgaaaagctatttttccaatcatgatgaaagtctgaagaaaaatgatagatttatcgcttctgtgacagacagtgaaaacacaaatcaaagagaagctgcaagtcatggtaagtcctctgtttagttgaactacaggtttttttgttgttgttgttttgattttttttttttgaggtggagtcttgctctgtcacccgtgatctcggtttaccgcaacctctgcctcccgtgctcaagcgatcctgcctcagcttgccaagtagctgagattacaagcatgcaccaccatgcccaactattgtatttttagtagagatggcatttcaccatgttggccaggctggtctcaaatggtcgtgagccaccatgcccagcctgaactactctttttaattggcaccattgaaggattgctcctcttttcttaaagagaaaatatattacctttcctttcttgactactgaagtagtattttatctcaaagtattgagagtagaaactaacttggtgtgcctgtgatcccagctactcaggaggctgaggtgggaggatcgcttaagcccaggcggtcaaggttgcagtgagctgtgtgtgtgccactgcactcccacctgggcaacagagtgagaccgtgtctcaatggaaaaaaagagaaactaatttgatttcgatgacagtatttaaatactgtgtaagacagtactatttaatatgtggttgtgacacaaaaacaaagcctattgaaaattttcagagacaataagatatataattaacaaaatctgagctttttttttttctaattagaaagtaaatgtggtttagatataccatagtttacctaatcaggtcatggaatattgcatttttcttagtatgtgtgtatgtctgtataactgtgtaggatttgatatctgtttttgtctgtgtggtatcatgtacgtatgtatatgcatatgtaaaatcagatttacccttgttatagggccacagaattgatttggaacatctgttttgataggtcttagaatatttaattgtatatatagtaagattaggtgagttttaattgtgtagaactgctaaagaaaggtttttagggattgttgtatgaataaaaggctttaggttcattggaatcaggggaatcaggctttactagaagaacaggagaaggggtgactgaccgaaaaataaaatgccaagtactcagaataaccctttaaatactgatatgtaatatttagcacattctacataaactgtttctatgagaaaggttgtgagaataatataaattatatggcttataaaatattaatgtgcttctgttttatactttaacaggatttggaaaaacatcagggaattcatttaaagtaaatagctgcaaagaccacattggaaagtcaatgccaaatgtcctagaagatgaagtatatgaaacagttgtagatacctctgaagaagatagtttttcattatgtttttctaaatgtagaacaaaaaatctacaaaaagtaagaactagcaagactaggaaaaaaattttccatgaagcaaacgctgatgaatgtgaaaaatctaaaaaccaagtgaaagaaaaatactcatttgtatctgaagtggaaccaaatgatactgatccattagattcaaatgtagcaaatcagaagccctttgagagtggaagtgacaaaatctccaaggaagttgtaccgtctttggcctgtgaatggtctcaactaaccctttcaggtctaaatggagcccagatggagaaaatacccctattgcatatttcttcatgtgaccaaaatatttcagaaaaagacctattagacacagagaacaaaagaaagaaagattttcttacttcagagaattctttgccacgtatttctagcctaccaaaatcagagaagccattaaatgaggaaacagtggtaaataagagagatgaagagcagcatcttgaatctcatacagactgcattcttgcagtaaagcaggcaatatctggaacttctccagtggcttcttcatttcagggtatcaaaaagtctatattcagaataagagaatcacctaaagagactttcaatgcaagtttttcaggtcatatgactgatccaaactttaaaaaagaaactgaagcctctgaaagtggactggaaatacatactgtttgctcacagaaggaggactccttatgtccaaatttaattgataatggaagctggccagccaccaccacacagaattctgtagctttgaagaatgcaggtttaatatccactttgaaaaagaaaacaaataagtttatttatgctatacatgatgaaacatcttataaaggaaaaaaaataccgaaagaccaaaaatcagaactaattaactgttcagcccagtttgaagcaaatgcttttgaagcaccacttacatttgcaaatgctgattcaggtacctctgtctttttttttttgtaaatagtacatatagttttatagatgacgattccttctgtgtttttttctgctttttaaaatcttcatatcttatatttaatcttaggcatcatctgtatacatgattgtttaggtctttaattaccagtgtttagaatcaggtcactcaaacatggtagataagtttgcatagtttgtgtatatccatcactcttgagacagttttattttaagttccggggtacatgtgcaggatgtgcaggtttgttacataagtaaacgtatgccatgttggtttgctgcacctgtcaacccttcacctgagtattaagcccagcatgcattagctatttttcctggtgctctccttccccccacacacccccacctcctgacagaccctagtgtgtgttgttcccctccctgtgtccgtgtgttctcattgttcagctcccacttatgagtgagaacatgtgatgtttagttttctgttcctgcattagtttgcttaggataatggcttccagctccatctgtgtccctgcaaaggacgtgatcttgttcctttttatggctacatggtattccatggtgtatagttccacattttatttatccagtctatcattgatgggcatttgggttgattccatgtctgtgctattgtgaatagtgctgcagtgaatgtacaggtggatgtatctttataatacaatgatttatcttcctttgggtatataccccgtaatgggattgctgagtcagatggtatttttggttctaggtctttgaggaattgccacactgtcttccacaacggttgaactaatttacattccagccaacaacttgagacagtttttgactcataaacattcagagcttggctagctaattcctgctttaatttaaaaagtgtttattatatgcaaattggacaactcatataaatatgtggtgctacttactatgtattttctctaaagcatgttaaaaaaataggctagatatagtggctcatgcctgtaatcttagcactttgggaggctaaggcaggaggatcacttatggtcaggagtttaagaacaccctgggcaacatagcgagaccccatctctacaaaaaatttaaaatacccaggcatggtggcatgcttctgatgttgtagctactcaggatgctcagacaggaggatcacttgagcccaagtgactgaggctgcagtgaaccaaaattgtaccagtgcactccagcctgggccacaaaatgagaccttgtccctgaaaaaaaaaaaagaaaaaaaaaatttaaatagaggaaatactagctaagtttaatgtaggccagttctaaaataatgatttattgctgctgttgttacataattttcttaaatattttaaagattgcatactgttactgctctatttctgcatctccgtggtgtaactctgtcctctttgttgttgcaacagttcacttagcaactaaactgtatgtttacaaagtgattttatctccctatgagaagactttagtgaatagctcagtgaatagtagagttggtgagaccacagtacagaactgtttgaagtttgggttaaatttttagaggaaaatgtttgatactatgcatatcatagttaaagccaatgaaaaagctaatataggccaggcgcagtggctcacgcctataatcccagcactttgggaggccaaggcaggcagatcacttaaggtcaagagttcaagaccagcctggccaacatggtaaaaccccatctctatgaaaaaaaacaaaaattatccagatgtggtggcatgtgcctgtaatcccagctactcgggacgctaaggcaggagaatcacttgaacctgggagatggaggttgcaatgagctgagatcacgccactgcactccagcctgggtgacagaacgagactccatctcaaaaaaaaaaaaaaaaaaagctaatacatgtgatcactgatgaaatgcaattaagaactggttagtagaaaattcagagggtcaagaaatttaacagagcagttgaactcatttgcctttatcgttgagattagatcatctttcaggctgttagtatatggaccctgtttttaaaaattgtggttttgtttttttcaatgtgaaagaattaagaaaattgttacttttctaattccttttctgtgccttgcttttctgttcacaccagtattaacagcaatgaaattttttcaattttattttccaataaaaattactttgagttttttttatggtagctagctacttccttgacctagatactaattttgattgagttggtaactattattaaaaaaacaacttaggtctaatttatcttgagctaaaaaatgtaataactgaaaaatagagcatatttaggattctttctgctttaaatttgacattcagttattttcatgtaatttgtgttttgagcactaccttttaattaatttatttatttttattttttagagactgtctcattctgttacctagtctggagtgcactagtgtgatctcagctcaccgtagcctcaccctcctgggctcaagcagtccttgcacctcaccctcctgagtaactggcaccacaggcatacaccaccacacccagctaatttttatttttcatagagtcatggtctcactatgttgcccaggctagtctcgaactcctgggctcaagcagtcttcctgcctcagcctcccaaaagtgctgagattacaggcatgagccactgtgcccaaacactacctttttaacttagtgaaaaatatttagtgaatgtgattgatggtactttaattttgtcactttgtgtttttatgtttaggtttattgcattcttctgtgaaaagaagctgttcacagaatgattctgaagaaccaactttgtccttaactagctcttttgggacaattctgaggaaatgttctagaaatgaaacatgttctaataatacagtaatctctcaggatcttgattataaagaagcaaaatgtaataaggaaaaactacagttatttattaccccagaagctgattctctgtcatgcctgcaggaaggacagtgtgaaaatgatccaaaaagcaaaaaagtttcagatataaaagaagaggtcttggctgcagcatgtcacccagtacaacattcaaaagtggaatacagtgatactgactttcaatcccagaaaagtcttttatatgatcatgaaaatgccagcactcttattttaactcctacttccaaggatgttctgtcaaacctagtcatgatttctagaggcaaagaatcatacaaaatgtcagacaagctcaaaggtaacaattatgaatctgatgttgaattaaccaaaaatattcccatggaaaagaatcaagatgtatgtgctttaaatgaaaattataaaaacgttgagctgttgccacctgaaaaatacatgagagtagcatcaccttcaagaaaggtacaattcaaccaaaacacaaatctaagagtaatccaaaaaaatcaagaagaaactacttcaatttcaaaaataactgtcaatccagactctgaagaacttttctcagacaatgagaataattttgtcttccaagtagctaatgaaaggaataatcttgctttaggaaatactaaggaacttcatgaaacagacttgacttgtgtaaacgaacccattttcaagaactctaccatggttttatatggagacacaggtgataaacaagcaacccaagtgtcaattaaaaaagatttggtttatgttcttgcagaggagaacaaaaatagtgtaaagcagcatataaaaatgactctaggtcaagatttaaaatcggacatctccttgaatatagataaaataccagaaaaaaataatgattacatgaacaaatgggcaggactcttaggtccaatttcaaatcacagttttggaggtagcttcagaacagcttcaaataaggaaatcaagctctctgaacataacattaagaagagcaaaatgttcttcaaagatattgaagaacaatatcctactagtttagcttgtgttgaaattgtaaataccttggcattagataatcaaaagaaactgagcaagcctcagtcaattaatactgtatctgcacatttacagagtagtgtagttgtttctgattgtaaaaatagtcatataacccctcagatgttattttccaagcaggattttaattcaaaccataatttaacacctagccaaaaggcagaaattacagaactttctactatattagaagaatcaggaagtcagtttgaatttactcagtttagaaaaccaagctacatattgcagaagagtacatttgaagtgcctgaaaaccagatgactatcttaaagaccacttctgaggaatgcagagatgctgatcttcatgtcataatgaatgccccatcgattggtcaggtagacagcagcaagcaatttgaaggtacagttgaaattaaacggaagtttgctggcctgttgaaaaatgactgtaacaaaagtgcttctggttatttaacagatgaaaatgaagtggggtttaggggcttttattctgctcatggcacaaaactgaatgtttctactgaagctctgcaaaaagctgtgaaactgtttagtgatattgagaatattagtgaggaaacttctgcagaggtacatccaataagtttatcttcaagtaaatgtcatgattctgttgtttcaatgtttaagatagaaaatcataatgataaaactgtaagtgaaaaaaataataaatgccaactgatattacaaaataatattgaaatgactactggcacttttgttgaagaaattactgaaaattacaagagaaatactgaaaatgaagataacaaatatactgctgccagtagaaattctcataacttagaatttgatggcagtgattcaagtaaaaatgatactgtttgtattcataaagatgaaacggacttgctatttactgatcagcacaacatatgtcttaaattatctggccagtttatgaaggagggaaacactcagattaaagaagatttgtcagatttaacttttttggaagttgcgaaagctcaagaagcatgtcatggtaatacttcaaataaagaacagttaactgctactaaaacggagcaaaatataaaagattttgagacttctgatacattttttcagactgcaagtgggaaaaatattagtgtcgccaaagagtcatttaataaaattgtaaatttctttgatcagaaaccagaagaattgcataacttttccttaaattctgaattacattctgacataagaaagaacaaaatggacattctaagttatgaggaaacagacatagttaaacacaaaatactgaaagaaagtgtcccagttggtactggaaatcaactagtgaccttccagggacaacccgaacgtgatgaaaagatcaaagaacctactctattgggttttcatacagctagcgggaaaaaagttaaaattgcaaaggaatctttggacaaagtgaaaaacctttttgatgaaaaagagcaaggtactagtgaaatcaccagttttagccatcaatgggcaaagaccctaaagtacagagaggcctgtaaagaccttgaattagcatgtgagaccattgagatcacagctgccccaaagtgtaaagaaatgcagaattctctcaataatgataaaaaccttgtttctattgagactgtggtgccacctaagctcttaagtgataatttatgtagacaaactgaaaatctcaaaacatcaaaaagtatctttttgaaagttaaagtacatgaaaatgtagaaaaagaaacagcaaaaagtcctgcaacttgttacacaaatcagtccccttattcagtcattgaaaattcagccttagctttttacacaagttgtagtagaaaaacttctgtgagtcagacttcattacttgaagcaaaaaaatggcttagagaaggaatatttgatggtcaaccagaaagaataaatactgcagattatgtaggaaattatttgtatgaaaataattcaaacagtactatagctgaaaatgacaaaaatcatctctccgaaaaacaagatacttatttaagtaacagtagcatgtctaacagctattcctaccattctgatgaggtatataatgattcaggatatctctcaaaaaataaacttgattctggtattgagccagtattgaagaatgttgaagatcaaaaaaacactagtttttccaaagtaatatccaatgtaaaagatgcaaatgcatacccacaaactgtaaatgaagatatttgcgttgaggaacttgtgactagctcttcaccctgcaaaaataaaaatgcagccattaaattgtccatatctaatagtaataattttgaggtagggccacctgcatttaggatagccagtggtaaaatcgtttgtgtttcacatgaaacaattaaaaaagtgaaagacatatttacagacagtttcagtaaagtaattaaggaaaacaacgagaataaatcaaaaatttgccaaacgaaaattatggcaggttgttacgaggcattggatgattcagaggatattcttcataactctctagataatgatgaatgtagcacgcattcacataaggtttttgctgacattcagagtgaagaaattttacaacataaccaaaatatgtctggattggagaaagtttctaaaatatcaccttgtgatgttagtttggaaacttcagatatatgtaaatgtagtatagggaagcttcataagtcagtctcatctgcaaatacttgtgggatttttagcacagcaagtggaaaatctgtccaggtatcagatgcttcattacaaaacgcaagacaagtgttttctgaaatagaagatagtaccaagcaagtcttttccaaagtattgtttaaaagtaacgaacattcagaccagctcacaagagaagaaaatactgctatacgtactccagaacatttaatatcccaaaaaggcttttcatataatgtggtaaattcatctgctttctctggatttagtacagcaagtggaaagcaagtttccattttagaaagttccttacacaaagttaagggagtgttagaggaatttgatttaatcagaactgagcatagtcttcactattcacctacgtctagacaaaatgtatcaaaaatacttcctcgtgttgataagagaaacccagagcactgtgtaaactcagaaatggaaaaaacctgcagtaaagaatttaaattatcaaataacttaaatgttgaaggtggttcttcagaaaataatcactctattaaagtttctccatatctctctcaatttcaacaagacaaacaacagttggtattaggaaccaaagtgtcacttgttgagaacattcatgttttgggaaaagaacaggcttcacctaaaaacgtaaaaatggaaattggtaaaactgaaactttttctgatgttcctgtgaaaacaaatatagaagtttgttctacttactccaaagattcagaaaactactttgaaacagaagcagtagaaattgctaaagcttttatggaagatgatgaactgacagattctaaactgccaagtcatgccacacattctctttttacatgtcccgaaaatgaggaaatggttttgtcaaattcaagaattggaaaaagaagaggagagccccttatcttagtgggtaagtgttcatttttacctttcgtgttgccaatcactatttttaaagtgtttattcagtagacttggtatgctaacaattaagagtgttataaactatgtcttttcagccatttttgtgtagtcagtttgggggagtatggtttgatatacagatacacagattcagtattcgtatacagatttgatatcttggtatacagattcgatatctctgaatctgtataccaagaaatcatgttttaagggtctcaatatattttcaaaaagattattagtataataattgagaaattactgttaaaaagttttgagtttctctagaaaatttgaaactcttaacaaaacctgcataatactaacttaactgttttcatatacatagcaagttcagactctgacttatatgaactttaaaagttggtttccgggaggccgaggcgggcggatcacgaggtcaggagatcgagaccatcccggctaaaacggtgaaaccccgtctctactaaaaaaatacaaaaaattagccgggcgtagtggcgggcgcctgtagtcccagctacttgggaggctgaggcaggagaatggcgtgaacctgggaggcggagcttgcagtgagccgagatcccgccactgcactccagcctgggcgacagagcgagactccgtctcaaaaaaaaaaaaaaagttggtttccgattataccatttactgggtaatatatactacttagttacactacttacatagcttcagtttccttatctataaaatgcaaataacacctcccatgagggctgggcgtggcgctcatgcctgtaatcccagcactttgggaggccgaggtgggtggatcacctgaggtcaggagtttgagaccagcctgaccaacatggtgaaaccccatctttactaaaaatacaaaaaattagccaagcgtggtggcgcgcacctataatcccaactactccagaagctgaggcaggagaatcacctgaacctgggaggtggagggtgcagtgagctgacatcacaccactgctctccagcctgggcaacagagcgagactgtctcaaaaaaaaaaaaaaaaaagtgtatttaaagcacttagcagtgaacttgacatatagtaggcagagagcattcagtaagtgttggcttgctccctttttttcatttaggaagtgatctaaaaacagtattgttagtaaatggtatcttgatcttaatgttatgtggactattttaacttcccttttaaatgtatatatatctaacaacttagttcaactacagtcatgtgtcatttgacagggatatatgttctgagaaatagattgttagatttcatcattgtgggaacatcatagagtatacttacacaaacctaggtggtatagcctactatatacctaggctgtatggtatagcttattgctcctaggctgcaaacctatacagcatgttactgtcctgaatactctaggcagttttaacacagtggcaagcatttgtgtatgtgaacatagaaaaggtacagtaaaaatacggtattaaaatcttatggggctgggctcagtggctcatgcctgtaatcccagcactttgggaggctgaggcaggcggatcacctgaggtcaggagtttgagaccagcctggccaacatggtaaaaccttgtctctactaaaaatataaaaattagctgggcatggtggtggcacacgcctgtaatcccagctactagggaagttgaagcaggagaatcacttgaaccctggaggcagagatttcagtgagccaagatcgcaccactgcactcctgcctgggcgacagagcaagactccatctgaaaaaaaaaaaaaatcttatgggaccactattaaagtcttataggatgaccattgcatatgtggtctattgttgaccaaaatgtcattatgtggcaaatgactgcattaggttaaccttatacatacctatattaggtatgtatttggttttgtttttttgtgtgtgtttttttctattagtgtatctgactggtaataatcttaaataattgaatctgtttgttagttgcaattaaagcaaatgccaaaactccaacatttcagtggataatcttaaataactagttcctttttaaaaaacctataaactcataaaaatattttagttattagaactcttcctgtctagaccccatgtattacagagagacaccgaagttagtctcctcattcaaaaagtgccttttgcccctaagtcattctggtggatacagatttacttaatcaagtgttgtccaggtcacattcaatataggatttactttatggacaaagtagtacgtttatagtacttaaactatttgctgtcctttagtgtgaaattctgaggtatatatgcttaaagatatttgtaattcttttgtggaaaataatggctttatttatagcaacccattctgttcttgtgcatactgaagtatattgactttccacctagggaaaaaaaaaacaataactcagacttgtaaatgctttcaacggtgttactacttaatttccctcatttctgtaacatataagtgtataacttagtcagcttctggttactggaacagtacaggtcactgttaaacaattaaaccacttttataataatctaacacctcctaaagccttgcatggacatttttacttattaaattatacaaatttattccctgtaataaagcatcaaaaagcaaagtacctgttatatattatctcagcatgacatggaaatgcctaccttgaattatggtttaatcttaccctcttagcctctgtagaatttttaaataagaattgtttctattactagtactttaatgtaatttgataattgtaaaaagcctcttaactctaattcaaggacctacataataaattactccttcagttaatggctgcccccgtgctgaaaaaaaaaaaaaaaaagagagaaaaagtttatttgaagaaattttgttaggccttattgccagtaaacctagagttatatttagtgtcagtttttcaaaaagtagcttatctgtggtatctggtagcatctgtttatcctatttaggatttatcctgtttagaccctgttaaatagtggtgttttaaagtggtcaaaacagaacaaaaatgtaattgacattgaagactgactttactctttcaaacattaggtcactatttgttgtaagtatttttgtttaacatttaaagagtcaatactttagctttaaaaaaatggtctatagacttttgagaaataaaactgatattatttgccttaaaaacatatatgaaatatttctttttaggagaaccctcaatcaaaagaaacttattaaatgaatttgacaggataatagaaaatcaagaaaaatccttaaaggcttcaaaaagcactccagatggtaaaattagctttttatttatatctgttctccctctataggtatggtatataatattctgacctcaggtgatccacctgcctctcaaagtgctgggattacagacatgagccactgtgcctaatcaaggacctctttatactcttaaaaattactgaggacctaaaagagcatttgtttatgtggaatatatctattgatatttaccatattagaaatgtaaattgattaatgttaaaattagtaatattatgcgttggtcatttggaagatatgagttcactgagttatgcggatcttccgaaagttgacagttttattatgcagtattaaacaatcactttcattgatgccattaccgatcagaaaagtttaagtagtagaaagctgtcaagcttacagagccagatacaagcttcccaaaaattctgattttcatctaaaagcttgaatttttccccggcaataagtattgtcacttatttttcttgtaggtgacaagcttattttcattcatttttgaaaagatgtctgccgaatacccaagtctgaataactatagtttgttggttattctttcaagtaaaaggtatttcatgaaaaaatagctagtatagctcacaactcaatcatttaagtgtgttttcttgagaaacgcactgaagtatgcaagcataatataccaacagtacaaatatcaacagtgaaaaggacatacataacattttactaataagacagttttgacagcttggattccctaaaatggttgtagatacctaacaggattccactgatcatttcttgagaatcattgtcctataatatatacataataatctaaatttacaatatcagtattaactactgacaataaaactactaaggaaaatgtaagaattgtttgcagtttttgtccttagagtatataggttgagtatccctatctgaaatgcttgggaccaggactatttcagatttcagattttttcagattttgaaatgcttgcatatacaatacataatgagatatctggggataggactcaagtctaaacacgaaatttatttaagtttcataaacaccttatacatataacttaaatgtaattttatacaatattttaaataatttttgcataagacaatttaaattgtgatccatcacatgaggtcagatgtggaattttctactggcctcatgttggcactcaaaaagtttcaggtttgtgaccattttggattttcagattagggatactcaacccatatattattaagaatgtttagtcaaaatactgtgttcaaatgtcactcaaaataattcttccggatgtggttaccaatttgataattaggttacattcctttttttccatttgttttcaattttaggatttgtcttttcttatttaattttacatttgaataaataaaacattacatagttcattcatcagaactacaaaaaggtatacttagagtttttattcacccacctcttgcttactataggtaatcttttttagtgtttttttttcaggattctgtttaataaaaataagcaaatacatgtatatactcattaccctttcttactcaaaagatacagtatatacaccattttgcaccttgtttattggttgttgtttacttaagaattatttggagatgactccttaatgagtatatagagatcgtcctcattcttttttgtggttacatagtagttgatcatctggctgtgtcagtgtttcctagtttatttaaccaatttccaactagtggacttattgaagatttaattaggttccagttacatactgagaatgaacaatatctaaagcttagcttttaaaccttcataagactaaattttaaatttggtatttgcatcagaaattagctaacacctttgagttatgatggttaacatcaactgactaaatttatgctgatttctgttgtatgcttgtactgtgagttatttggtgcatagtcattatcaatttgtgaatcaatttattttcatagttaacatttattgagcatctgttacattcactgaaaattgtaaagcctataattgtctcaaattttttgtgtatttacagtaacatggatattctcttagattttaactaatatgtaatataaaataattgtttcctaggcacaataaaagatcgaagattgtttatgcatcatgtttctttagagccgattacctgtgtaccctttcggtaagacatgtttaaatttttctaaattctaatacagtatgagaaaagtctcgtttttataaatgaacatttctaaaaataatgacactaacgttaagaagttaacacttcccgttttataaaatttataaaatactttggtagtattttatagtgctgttcatatcattattttattttttaattttatgacagctttgtaaagtagacagattttattctaattttatggatgaagtactaaggttgagaggaattaaggaaattgctccgaatcagttaacaaaaagattgcagatattaaaaatatccttttatctctcctctctaaacctttaaaaaagtactaagatagtttttttaatgtataattcccaaggacaatgatgagaagaaacaacaaaagtttggaagccaaaaacataaaggatttagtaagcatgagaaagctaaaacctgacactagagcaaacagagatgctttcccctaaaaaacctgaaaaagattcaaattggcagcaacaggtacttctgaaggtgaagtagaaaataggaagattagttgaaattctttttaagaaacatctatatttcctcccccactgcaaataggcggttatccttcttctgccaggaaatcagaaggttgttcttgaaaaagatgaattgagaggattctgaattgaaggtgggctggagggaggggacaccaggcacaattgagggaaagatactaaaatgaaagatcagatacaaatctgtatgtcaagcagtgagacctagctccttcccacacttggttcccaaatgcaggccctctaggcatgagactggaagatttttttttcctagggaatatgcctgacccaatagaaaagaccaaaaaatactgacagttgaggatactcagatgaaacagtatagccagtcaccagaccaggaagttaactgttgacatgcacagagcttccaggaagctacttagtgcttcacttttaaataagaaaagatagtcaaagataactagtcattggaagaaagctactatgaaacatagtcaccaaagtacaaaatccatagcagaaaggaacctagaggaaatcgactatgaaaacttcataaaaacctactaatattctcaggtaagaaaagaaaaaatggccgtaaaataagaacaagttgctataaaaagctcttagaaattaaaaatatgatagcacaaataaattaactcagtagaaataatggaagaatcatgaaagttcccagaatacagaataaaatgaaaaaaggtatgaaaagtcaattctgtggatctatcatctgaaaatacagagtttgagaaggaaggcacagaagagaaatgaagaaagaaattttaaaataaatacataattttaaaagttctactagtactgaaggacatgagtttccttaattaaaagggcccactgagtgagcacacaagtaaaaatgacccacagtaaggcacatccttgtgaatttttagaataatagaggcagacaggaaccttaaattcattagaggaccaagaagttaggtttcaaattgtttcaagccataatagtatgaattctcttattatcaacaatggaatctagaagactgtagatcttatataatacagagaagtgccttcaaaatactgagagaaaatgatttccaacctagaatctgaattaagtgtgagggtagacatttttcagatgtgaagtactaaaagatctcttgtgcgcttttctcaggaaactaaccaaaacaaatgcatacaccaagaaggaggaaggtataggacttaagaaataagaattcaacatagaagagaggcaaagggagctttcaggatgatattgaagggagatcccagagtagctgtgttgctaagtctagaaaggcagctagactactttggaactgaagaagataagagactttggaagagtttgccttcaagataaaaataaagcagtacctgcatgttttaatgtattaggaaacttcttagtaaagatggtgaattgaggccaggcacagtggcttacacctgtaatccagcacattgggaggctgaggtgggtagatcacttgaggccaggagttcgagactagcctggccaacatggtaaaatcccatctctactgaaaatacaaaaattagccaggcgtggtggcacacgcctgtaatcccagctactccagaggctgaggcacaagaaccgcttgaacctttgaggtggaggttgtggtaaaattgcaccactgcacttcagcctgggtgacagagtgagactctgtctcaaaaaaaaaaaaaaaaaaaaaaagatggtgaattgaacatactcatatcctttctttgccttccaaacttttaccaaaacatcattgaagaaacttacacacacacaaaaaaaaaacaaggaaaataggaaataacaaagtaactaaatttctcaaagcatgcagaaggaaactgaatgaaagctggtggtggggacagcagagaaccaacgattttacactcaggtctcaaaagactaggaattggtggcttcatttcttatctttagaattgggtggtgcagaaggagggagccaaaatggaataagttgaaattatgtttaagaagcaatactcgccgggtacggtggctcacatggaggctgaggcgggtgaatcacctgaggtcaggaattcgagaccagcctggctaacatggtgaaaccccatctctgttaaaaatgcaaaaattagctcggcatggtagcatgcccctgtaatccagctactcaggaggctgaggtgggagaactgcttgaacccaggaggtggaggctgcagtgagccaagattgcgccactgcactccagcctggacgacagagcaagaccccacatcaaaaaaaaaaaaaaaaaagcagcagcagcaatactcatgaagctgggcaactgtctcctgcccgctctatgaaaagaaccagaggcttattctccagagaggatacagtagaaggtgaacacactaggcacagttgaaggcagaagcaactacttgaaagcaagaagaagttaatatatgcatattgaatgttgggatctcccctcaccaagcccttttccaccactcagcttccagaacatagacagctaagttttcactagtggaagtttccatttaatcaagctactgtgtagcttgcagtcaacaagttctatctttgtaccaagtgcttcaaaacagccttttggtccctcactcttaactataaacagacatccaaagattatgagacatcagaaaaagcaaaaataaaataaccaaaaaacacattaatgaaaacaacttagaagaaacattattcaaggagaagaaaaaatgtttttttaaaaactataatttgtgaacagaatgaaaagaggtttatatatatagctaagagtttagatgtgaataaacagtaagtacatagaaaataagcagattttaaaaattaactcaagagaaagcaaaagttgtaaaggaagtacactatttatatactacccattaatggccgggtgtggtggttcacgcctgtaatcccagcactttgggaggccgaggcgggtggatcacaaggtcaggagatcgagaccatcctggctaacatggtgaaaccccatctctactaaaaataacaaaacaaaattagccagacgtagtggtgggcgcctgtagtcccagctacttgggaggctgaggcaggagaatggcatcaacccaggaggcggagctttcagtgagccgagattgcaccactgcactccagcctgggcgagagagcgagactccgtctcaaaaaaaaaacaacaaaataaaaaaataaaataaaatatactgcctattaatactacatatactttatactgacttagccgtaatgtaaatgttgaacattgatagtgagaggtgaagctggctgggcttctgggtcgtgtggggacttggagaacttttctgtccggctaaaggattgtaaacacaccaatcagcgctctgtgtctagctaaaggtttgtaaacgcaccggtcagcactctgtgtctagctaaaggtttgtaaatgcaccaatcagcactctgtaaaatagaccaatcagcaggacgtgggcggggccaaataagggaataaaagctggccacctgagccagccccagcagccgctcggctccacttccatgccatggaatctttgttttttcactctttgcaatgaatcttgctgctgctcactctttagtgagcactacctttatgagctgtaacactcaccacgaaggtctgcggcttcactcctgaagtcagcaagaccacgaacccaccaggaagaagaaacaaccctgtacgtgccatctttgagagctgtaacactcactgggaaggtctgcggcttcactcctgaagtcagcaagaccacaaacccaccagaaagaagaaactctggacacatctgaacatcaggaagaacaaactcgggacacactatctttaagaactgtaacaccatgagggtccacagcttcattcttgaagtcagcaagaccaagaacccaccagaaggaaccaattccggacacagtagaattaaatacgtaatttaggaagatgaaaggcaagagtgtgtgtgtagtaaggtagaagctgtgttgacagagctgaattttcattttctgtaggggtacttcaagagaaaaagtcaagaagaaacatgtcacttagacatataaatatgataaaatcatctaaaactgtttaaagtagttgcaaaatcttttctagctgataaatttttaagcctaaaaatatcattgaaattattttaatgttacattttattttattttatttatttatttatttattttgatacagagtctcactctgtcgcccaggctggagtacagtggcacgatcttggctcactgcaacctctgcctcctaggttcaagcgactctcctgcttcagcctcccaagtagccgggattacaggcgcgtgccaccatgcccggctaattttttgtatttttactagagaaggggtttcaccgtgttagccaggatggtctggatctcctgacctcgtgatccgcccaccttggcctcccaaggtgctgggattacagacgtgagccactgtaccaggcctaatgttaccttttcaaaaacacctgattgtggaattgttgaagtcactgagttgtatttctggaatgtgttttttagcaggctgcacatacacatatgtagaaagccaggtgatttttttttcatttcttttttttttatcaaaaacagttgtattaaataagaaaggaaatacgtatttacccgtgtattaccttaatttatgtgtaaaatgggagaatagtttaatgtatttaacaaacaaacatttgttaaagtacctgctcaaactacctaatatatactatagtgaaagatataaggataaataagtctaactcagattgctagcctgggaaccagacatgaaaacaagaattataatgtaatataaattctagaatagatgtaaaaagtgatctaagaacatagaaaaattatcagctaatcacatgactgctcaatgggaaaagtacttcagacagaatgtaaagaatgcttggttaaagatggcattccaaatcttggaatttggttgggggacagagggaaacaaaaagaaatggggaggttaggaccaaataggaagcttcctgtatgtcatttctgataagttgaaacctaggtaggtgataggctgtctttggaagtttctaacaagaggaacaaaataagattggtgttttagaagtataccaaagcaaaactgttgcaaggagattagtaaatacaggtcttaacctagcagaggaggtagagggtagagaatgattgagatagaaattcagtagatttggccagatagtgataagttgagactggcaaattatttccacttagatttaaatagatatcttgagcataacctacaaggcaaactccttatactaaaaatattctgaatatttaaaaagaaaggattaaaagatcaatcaatagaagtttggggacagaaggtttattcattcttgtgcattagatctcatctagatcacctgtttgaagaaatcattccagcaattatcttgtctctctcctgcatggatttttttcctaatagattgttctcatcaccctaagcagttgttgtacatctctcatcttaaaaagaacagcctttcttaagtaatctcaacagtccattttcttctcttaaagcccaactcattagaattgtccctcctcttttcacttatctctttgagtactctcctgaacccagtctagtcagtcctttcagtagaactggtccccctgcttacctccctactcctcaatacacagtgaattctcaacaaagaagccgggggatccttttaaacataagacagattatgtcatttctttactcagaactattccgtggtgtgccatctcagagtagagactaaaagcccttgtcatggtgtacagattcttcatgatctggctgctttgctatttttccagtctgaccttctaatgttccccttgctctccttgctccaggcacacttgtgtctaggccaatcgacatatttgtttgtctgtttccttccactgaaatatacatgcaaaaacaaaattttgttaccgtgttccccagcaaaacaatgtctggcacctggtaggaattcattaaatagttgatggatgggcgaacggataactaaaggaacaacttcaagttccaggtatccagggtttggtaaaaggaaatctggggttttcaacaagatatcaagtattaggaagaccacgtatgctgagaaagatgatcacttttggacatgttgagtttgaaatgagtgtgaaacatcaaggtacagatgtctgatgctatatgtagtgtaaaatgtaggaacaaccctaggagaaaaatcgggcatgaggataaaggatattttcattgttaggtgataatttaagcaatggaaatgactcacattagcaagggaaagtgtctaaggaagacatccagttttggagactttttttgaggaatcaggaagaggtaaaaccagtaaaagatgaaagaggtacagtgatggtgagaattttaaaagaaggaaaatgtaaactgtcatagctattaggaaagttgagtagaatgagtttgcgtgcatcccacatgcatctgggaggtcattaacaactttattgagaacagtttctgtagagtagtgggagaaatgagagtttattgagtagagattgaggaagtgaaaatagctacattacctattgaagaaggttgactgtggagtgtaacagtgagtattagcttgaggcagagataaaggtgagtgagaaaataagagtttcaaaggtaggcaagatttttgggctaaataaaaagggcactttaaaaaaggtataaataggtagaagagagaaaagggagcgaggtgggataattgaaagaggggatctcctgtggagactgaggtattaggcggagtagagagttcaggtgaagatgtgaaggtgagagaagaggatgggtagacatttccctggtgaaggaggtaaggagtactatgatggaattagaggggacacactgagagggtccacacttgacagactctcttctattatgtgttatgtgaggtagattgtaaagtcaaaggctagccttgaaaaatgtgatattgttttggaatggcaaccatggtgaatacaaaacagttaccagaatagtatcaccatgtagcaaatgagggtctgcaacaaaggcatattcctaaatatttatatgtgtactagtcaataaacttatatattttctccccattgcagcacaactaaggaacgtcaagagatacagaatccaaattttaccgcacctggtcaagaatttctgtctaaatctcatttgtatgaacatctgactttggaaaaatcttcaagcaatttagcagtttcaggacatccattttatcaagtttctgctacaagaaatgaaaaaatgagacacttgattactacaggcagaccaaccaaagtctttgttccaccttttaaaactaaatcacattttcacagagttgaacagtgtgttaggaatattaacttggaggaaaacagacaaaagcaaaacattgatggacatggctctgatgatagtaaaaataagattaatgacaatgagattcatcagtttaacaaaaacaactccaatcaagcagtagctgtaactttcacaaagtgtgaagaagaacctttaggtattgtatgacaatttgtgtgatgaatttttgcctttcagttagatatttccgttgttaaataatgtcctgatggttttccccctttggtggtggtaattttaaagccctttttaatgttttagattttctaaatccaaagattaggtttaaattattctaatgtttctttcaaagataacttcttgtggacttgttaaaaaaaattagacacacaatctaggactgctgttactggaatatattttctatcatgctactaattttctttttaaaatgtgataaaaatagggccgggcgtggtggctcatgcctgtaatcccagaactttgggagactaaggcgggcggatcacctgaggtcaggagttcaagaccagcctggccaacatagtgaaaccctgtctctactaaaaatacaaaataaataaataaataaataaatagctgagcgtggtggcaggcacctgtaatcccagctgcttgggaggctgaggcaggagaatcgtttgaacccgggaggcagaggttgcagtgagccgagatcgcgccattgcactccagcctgggcaacaagagtgaaaaactctgtctcaaaaagagataaaaatagtaaagatattcatatttatacagctttacaagttgaaacatcctttcatttatgaagaattaaaaggggtaccctttttagagaaaaggagagcatgtaaacttcgaggaaattgatatgtataattttataaaacagggcttgcgcttttttttttttgagacagagtttcgctcttgttgcccaggctggagtgcaatggtgcaacctcggctcaccgcaacctcctcctcccgagttcaagtgattctcctgcctcagcctgctgaatagctgggattacaggcatgtgccaccacacctggctacttttgtgttttttttacttttatatattttttttttgtttagtagagacagggtttctccattttggtcaggctggtcttgaactcccgacctcagatgatctgcccgcctcagcctcccaaagtgctgggattacaggcgtgagccactgtgcctggccaggggttgtgctttttaaatttcaattttatttttgctaagtatttattctttgatagatttaattacaagtcttcagaatgccagagatatacaggatatgcgaattaagaagaaacaaaggcaacgcgtctttccacagccaggcagtctgtatcttgcaaaaacatccactctgcctcgaatctctctgaaagcagcagtaggaggccaagttccctctgcgtgttctcataaacaggtatgtgtttgtctacaatactgatggcttttatgacagagtgtaattttatttcattaactagtatctacaaatggctttgtttaaagaatgaacacattagtgcaggaatggatgaatgaaatcatcatattttctaattagcctgcagtggcagcctctggccccttgctaggcctgcctcatcctgctaaagtgatctgtgcttccaaattactacttcttttcccccttcaaatctttcttattttgtcattgtaaatgctctcagctaggtgttaaagtagtcttactgatattcaaatgtgaataactgatagccctgaaccttctatgagctatttatattttccaaagaggattctccttaagccaatattatctaggtagaattttaggcaatggagaggtgaaaataatattgatgacattaatagctaactttgagcattttctaggtgtaagatgctcttctaagcacttcacatgcattaggtatatcttgcttaatcctcacagtcaccttgaaagaaaggcactgttactttgtttccattttgcaaatgagagaactgaagcatagagagggttaagtaactgccccaaagtcacttaactagtaagtggaagtgctatgattccaaagcaaagagtctgactccagagtcaaactctgaacaaacaaaaagacactttgggttagatatcctggggtgaaagcaagcactttgaaagtaagccaagcctgtgtacagatctgaccacctgaggtcacattccctaaaatacttaaacttctcccttttgtttcccatctaagtttttgaacttaagagattttgtaaaacatcacatttttttatcctcacagtaccttcctatggcagatttagcaggaggcgtataaacggggtggaaaaggtacagcagactgtggaatgtatggatcatttatattacattaaaatttttagtttctagtaaataacttaaatgtttttgtagtgaagattctagtagttaatgaaaatttttggtaaattcagttttggtttgttataattgtttttattgtgtgatacatgtttactttaaattgtttttcttttttgtgtgtgtttattttgtgtagctgtatacgtatggcgtttctaaacattgcataaaaattaacagcaaaaatgcagagtcttttcagtttcacactgaagattattttggtaaggaaagtttatggactggaaaaggaatacagttggctgatggtggatggctcataccctccaatgatggaaaggctggaaaagaagaattttataggtactctatgcaaaaagattgtgtgttaacttttatgtattccctcatccctctttcttctcttaactgtctctcgaactaaaaagttggctagaaatcaaatttttatgcatttaattgttttaagtgcattatggttaagcattctgtagaagtcttttgaaaagtgctgtttgtcctggggtttaatgaactggattttcttgatttgggacatttttcttaggcatttataaatatagcccaatttataaagttaaatttggccgggtacagtggctcatgcctgtaatcccagcactttgggaggccgaggcgggtagatcacctgaggtcaggagttcgagaccagcctggccaacgtggcgaaaccccatctctactaaaagtacaagaactatctgggcgtggtggcaggcacctgtaatcccggctactctggaggctgaggcaggagaatcgcttgaacctgggaggcagaggttgcagtgagccaagattgagccactgcactccaggctgggcgataagagtgagactccatctcaaaaaaaaaaaaaagaaaaaagttaaatttgagggccagacatggtggctcatgcctgtaatcccagcactttgggaggctgaggtgggcagatctcttgagcacaggagtttgagaccagcctgggcaacatggtgaaaacccatctctacaaacaaattaaaaaattagcccagccaggcgcggtggctcacgcctgtagtcccaacacttcggaaggccaagatgggccaattacctgagggtcaggagttcgagaccagcctggccaacatggtgaaaccccagctctactaaaaatacaaaaattagccaggtatggtgatgcatgcccgtaatcccagctactcgggaggctgaggcaggagaatcatttgagcccagtaggtggaggttgcagtgagccaagatcacgccactgcactccagcctgggcaacagagcaagaccctatttcaaaaaaggccaggtgcggtggctcacacctataatcccagcactttgggaggttgaggtgggcagatcacctgaggtcaggaatttgaaaccagcctggccaacatggcaaaaccccatctctactaaaaatacaaaaattagctggacgtggtggcacgcgcctgcaatcccacttacttgggaggccgaggcaggaaaatcgtttgaacccgggaggcggaggttgcagtgagccaaaattgcaccactgcactgcagcctgggcaacagtgagactccatctcaagaaaaaaaaaaaaaaaaaaaaagaaagttaaatttgaaatggccttatggtagattcctcccccgacacacacttacttcatgttttctttcattatatattttaatggatacaaaatataaataaacactaaaagttaaacagaaatatttgaatatcaataatgccaaataactagaaaatctcagagctctaaaacagcaacaatttagaaactatataacctctttttattgtagtttttacagaaacataatttaaagctttttgttatcagagatatattacattatgccagtggcaaaagatgggatttatttcctcagcatccttatctttaaatttctgtacatctttccaaaatttatagctttggaaaagtgataaaactttttttcctgaattttgttttaacttttaaaaacagaaatattgtttacatcttgcgtatcttatataacaaacatctgcttatagattccagtaagaaaagttggttaaacggttgtattattttctcgtactaaatagactgcataaggtagaagttaagaatgattgccctgtagtctaagtggaaatgtggaggctttcgttagttttttctgataattcagcaaatctctattgagcacttgctatgtgccaggtactattctgggtactagggataataaaggaaaacaaaaaagtccctgccctgatgagtcatacattctatgtggaaggcatagaaaatattgaaatataagtgaattgtgtagtatgttagaagaagatacatactataaagatagataaagttggaaaggtggcagagaaagttgggcaaggagatgcgatttttaatctaataagtagttaggaaggcttcactgagtcagctacatttgataaatgacctaaagtaaaaggagggagcataggactatcctagcaaaagacccccagcctctaagaggggagcatgcttgaagtatttgaggaacaggaagttagtgcaactggagtagagtgggcaggagaagagtagtagtagatgagatacaaaaggaagacctcatagaccttcgtaagacccttaccttttactctgcacgatttttactgaataaaccactggaaggcttaaagggtaacatgatctgacttttttttgagacagtctcactctattgctcaggctggagtgcagtggtgcaatctcggctcactgcagcctccacctcccaggttcaagcgattctcctgcctcagcctcccgtgtagctgggactacaggcgcgcaccaccgtgcccggctgatttttgtgtttttagtagagacagggtttcaccatgttggccaggttggtctcaaactcctgacctcaggatccaccctcctcggcctcccaaagtgctggaattacaggtgtgagccactgtgtccagcctgatctgacttatttttgaaaaaataattctggctgtttgttgaggagaggggcaaagatggacacacagagaccacttaagctattgcagaaatacatgtgagaggtggttggttggaccagggaagtggcagtggaattggtggaaagcagttggactctggggtattttgaaagtggcactattaggagttgctcaaggattagatataaaacgtgagagaggaggagaataagaatggctgtgaagattttggccttagcagctggaaggatagagttgtatgtaactactagaattgagaagaccaaagatggagggaaatggagagtttggttttggacatttgaagcttgagatgtaatagtagacagccaagtggagatgttaggtaggcagttggatatggaagtctatacacaggtaaagtataggccaaataaatcaattcacaagtcatcggcatatagatggacttgaaggccatgaaaaagagactgagaaagagcagccagaaagttaggaataaatgcagaatggggtgttgcattccaaatgaagatggaattttagggaatagaaaatgaccagctgtggaagctgcttctaataggtaaagtaagatgaggactgagattggccgctggatttagcactgcagaagacattactaatgttattaaaaatagctcaatagattggtggagtgatatcctgattagaatgcaattaaagagcagttgaagaggaggaattggagacacagaatacagtcgattcttttgggagttgccaaaaagaagcagagagagggacattgcttggagaggaagtaggatcaaagagtcttagttttggcttgttttaaggtagaaaaaaaccgtttcttatgctgattcacattgttcagtagagagggaaaaaattgatgatgcaggagagagaggaggcatttcctgatcgttggccttgtaggcagcaaggggtaggagctagtgcacaaatggtagaagagggcaaagtgtaaggatgcagatgcttggaagagggcaaagtgtagggatacagatgctgtgagtggatagatatgagggtgggagcttatggaagttctcttttgattacttctgttgtcttagtgctaagagtatgaatgagaaaggaggagttagagatttgagaacagaggggacaggatcaaagagagcaccaagactaagaaaggcagttctcaggcgtgatttctaaaaaaatctctttcataagaaaaataatctaaaatataattatttaaaatcaaggatctcatttttcaggaacaaatatgagttgaaatcattctgttgactgttaagtggaattttttgttttgtttttatattttgagatagggtctcactcttgtccaggctggagtgcagtggcactatcatggctcactgcagcctcaacctcctgggctcaagcaatcctcccaccacagcctcctaagtagctgggaccacagatgtgagctaccactcttggctgattttttttattattttttgtagagatgtgggggtctcactatgttgcctaggctggtctcaaacttctggcctcaagcaatcctcctgcctcagcttcccaaaatgctgggagtataggcatgagccaccatgctcagcaatgaagtttttatcagtatgatactttgatacatgtcaaataattttctgaaattatattgtagatcatatgaactcataaaaacttaatgatcttgaacaatgtagtttttgtacagagaatagttgtagttgttgaattcagtatcatcctatgtggtttttatgataatattctacttttatttgttcagggctctgtgtgacactccaggtgtggatccaaagcttatttctagaatttgggtttataatcactatagatggatcatatggaaactggcagctatggaatgtgcctttcctaaggaatttgctaatagatgcctaagcccagaaagggtgcttcttcaactaaaatacaggcaagtttaaagcattacattacgtaatcatatacggcagtatggttaaggtttctgtgtagtctgtgacttccatgtcaaaatgttgcacaagccagttgtcagtgacagttgccatcccacactgctgttctcctgtcatccctagcccccatttaagagagatcacacattcatgcattgcttgcttccctctttccccaccccctccttaacctcttgatgtatgagaagaatatgagttactaatttgatccactatttggggattgctaataaagcatttttgcattttattttttgctttttaaaaataattgatattttaacaatatgaaacaatatattcctagctacaaaatttttaattctcagtatttcttagataaattcagtttttattctcagttattcagtgacttgtttaaacagtggaattctagagtcacacttcctaaaatatgcatttttgttttcacttttagatatgatacggaaattgatagaagcagaagatcggctataaaaaagataatggaaagggatgacacagctgcaaaaacacttgttctctgtgtttctgacataatttcattgagcgcaaatatatctgaaacttctagcaataaaactagtagtgcagatacccaaaaagtggccattattgaacttacagatgggtggtatgctgttaaggcccagttagatcctcccctcttagctgtcttaaagaatggcagactgacagttggtcagaagattattcttcatggagcagaactggtgggctctcctgatgcctgtacacctcttgaagccccagaatctcttatgttaaaggtaaattaatttgcactcttggtaaaaatcagtcattgattcagttaaattctagaagttttacatttaaattttaaatgcttactaaggatgctcaatttcttagatgtactgataattttagtataaaaagcatattcttcagacagttaaagtttttgtgcagtttttgggaggtccagagatctttcttgagcttaaataatgcatttccaattaaaaagcaaaataaatttgcaccatttgattttggtatctgtagcttgctgccctcttgttctcatagctttgctttgatcagatccctattccactctggattagagaattacattttagtacttttcaaatatgtaatagatacactttttatctctatgtagattttaaactacataacaggactctttgtcatattgaatggtctgcagtattgctatctgaaattaccgataatattgtacattcagattcacttaagaggtaaccttgcagagaatttacttctgtggtattctggatcactctaaagagaatgttttataaattaaacatttttaaggtaaagatatattttgtttggcattagttccatgttggattgattgctttttactgaaagcattccatcaagctgaaacagtcttttgttttatgttgcttagaacatcaagcttgcagtggctttcattttcttgtttttgtttttttttaaatcaaatcaatgcatgtgcataatttggaaactcaagtaatataagacatataaccaaaaaaaagcagttgctagcacaaccctccccatcctcattcatggtcccaagaggcaatcgtttccagtctgtttgactattttttagcttgtactgctgtcttctttctctcttcagtttagacagcaaccgttaacttcctgctatggaaaatgaggatttcattgtcttactccaacactgctacatatttctctaccctcttccccatcttccctctactaatacagcatgatttttagtgaaatctgtattcagtgtatacattataatgactgaaaaatattttttgcaatttaatacctaatcgactgtgatcacatttcctttctttacagcttactgctttccatgaagttattaactgtccttttcatttctcttaattttctgtgtccttacacaggagctataaaaatcctgcccaatatgttaaaatttctccattggttccatttctgtttcttggagaacccctggacctcttcatatgcttactccattctgaagtgctcattttctatgtgtgccatacagctctcattctgtaaattattcttacctcttttctgtgttagaaaccccatttcctggtttccatgtcatctttctagagtttttcccccaattttaagggcccacaactctcagaggcttgttgggaaaaggagcatgcaagctttttgatatcttagggtaaggttggctggatatagaattctaggttgaaataatttcttcagaatttttaagacatttcatttatcttctttagcatagctcctgctaattgcagtgcattcttttttttttttttttttttttttttttgagacaacgtctcactgtgttacataggctggagtgtttcattttgtacagatgaggtctccctgtgttgcctaggctggtcttgaacttctgggctcaaacggtcctcacgctttagcctccgagagtgctgggattacagacatgaaccactgtacctggcctgcggtgctgtttttatcttcagtcattcattatgtgctctggttttaagaagttaagattgttttgtctttatttttatttatttatttatttttgagacaaagtctcgctcttgttgcccaggctggagtgcaatggcgtgacctctgctcactgcaacctccgcctctcgggttcaagtgattctcctgtctcagcctcccgagtagctgggattacaggtacctgccaccacacccagccaaattttgtatttttagtagagacagggtttcaccatattggccaggctggtctcatcctgacctcaggtgatccacctgcctcagcctcccaaagtgttgggattacgggcatgagccaccacgcccagcctgttttgttgttatttaaatttcacagtaatgtactttggtgtctttttttttttttttttttttaacttttttttttcctttaattcttggcccagatgcttactggcacttactctagaaacacatagtccttcattgagttctggaaaattttctttaagtggttcttttataatttccctccatttttttctctagttttttctggaactcctgatgtttggacactaggcctcctatattgttcctataattttcttgtcttttctcctactttctatttgattgtctttttttattctaacttctgggatggtttttaatttttttcttctaattctttattaatatgccatgttttatagatttgtctttaaatatttttacataattttgtaacaaaatacaaaaaaagcaattcctaaaaatttagaaagtcaaatgaaagcaaagaacttaagtgtgttttcaattagagcataatcataccaagaaagtatttcaagtaacttaaaaaatgttttatgtccctagtggtatataccccaagaacaacaatagcaacaacaactataaaatgaaacaaaatcttaagctattgttagtaatcatattgctggtggtagtgttggtattcctattctgaagttatagtggatgtgaagtatgttgtatgtgtatactcttttacgtatatttgttgtatgtgagtaattatatgattatagagaacagggatctttttatcagagaaaggtgcagatgtgagattgaagtaaaagaaaacttgtggttctgcatttgtattggaaatatcattatgaactcgagatctatattatctttaaaaaatacatgctggctgggcacagtggctcacacctataatcccagcactttgagaggccaaggtgaatggatcacttgaggtcaggagttcaagaccagcctggccaacatggtgaaaccccgtctctactaaaaatataaaacttagccaggcatgatggcatgctcctgtagtcccagctactgtggaggctgaggtgggagaatcacttgaacctgggacgtagaggttgcagtgagccaaggtcgcaccactgcactccagcctgggcgacaaagtgagaccctgtctcaaagaaaaaaaaaaatatgcttattggtttcatctatcaaaaagaacaaaaaaaaaaaaaaaaggaataatccagtagtagtgagtaaccctagctctcagactgttttctaagtactgttttctcttaaaaggatgcaaggtgtcttgaagaaatggctgattccagattcagaggaggaaatatatgaatctggaaagtcttgacataccagaaaaaaactaagcatcaaacactactagtgtcatgtcaaaaggacttaggagtgtaatagaatagattcttactgatcacagataaaataatttgagcatcagaaaggataataacaggctgggcacactggcccacacctgtaatcccaagattttgggaggccgaggcaggcagatcacttggggtcaggagtttgagaccagcctggccaacatggtgaaaccccttctctactaaaaaatacaaaaattaggtaggcctgggggcgggtgtctgtaatcccagctatttgggaggctgaggcagggagaattgcttgaacccaggaagcggaggttgcagtgagccgagattgtgccactgcattctagcctgggtgacagagcgagactccatctcaaagaaaaaaaaaaggataataacagcaaaaaattgaaattcataacaaatgataacttctattctcattgttttaaaaactaaagcccaggcacagtgtctcacgcgtgtaattgcagtactttgggaggctgaggtgggcatactcaggagtatgagaccagcctgggcaacatgacaaaaccccatctctacaaaaaatacaaaaattaaccaggtgtggtggcatgtgcctatagtcccagctacttgagaggccgtggtgggaggatgacctgagcccaggaggcagaggttgcagcgagttgagatcgtgctactgcacttcagcctgggtgacagagccagagccagacccagcctcagaaaaacaacaaaaactaggtaaaaggagaaaaaaatcaagcatttatctttcttctcttatatgatctatattttgggaccctcaagtagatgaggggaagtttctgtttataaaaatgtttcaacaaataaggaataatagaattaaaatataaccatttcgcaaccctcaaattagggttgtcttttcttctaattcttttttttttttttttttttttttttttttttttttgagatggagtctcgcactgtcgcccaggctggagtgcagtggcacgatcttggctcactgcaacctctgcctcctggattcaagcgattctcctgcctcagcctcctaagtagctgggattataggcacccaccaccacacctggctaatttttttgtatttttagtagagacagggcttcactatgttggctacgctggtgttgaactcctgacctcgtgatctgcccgccttggcctcccaaagtgctgggattacaggcttgagcctgtaaatccagaaaaggattacagcccttttcttctagttcttaaagtgaatttgtgtctaccaacataattttcaagagacctttattattccctaaatgtttttcttttttttgtgacattcagttcttgtttcatagatacagtatcttctcatctttctaaagctaatgattaatgttttattttcattttcgttttttctgctccctgcattttttttttttaatgaaaacctttgtctatttgagtctctctggttagagactttcctcaatggtgatcattcactgatccagaagttgtatgtgaggtgaggcttgtcagctcatagggtagtaatgtagtgatttagtttttaactaggagaccctcaaatatcagtgactgttctgagagctgagcagagtaaggaaattaatagggagactcattgtcagtgtaagaattttatttcagtttgttgtttgttgtttgttttttgtttttttgttttttttttggttttttttgttttttttttagatggagtcttgctctgttgcccaggctagagtgcagtggtgcgatctcggctcactgcaacctccacctcccaggttcgaggaattctcctgcctcagcctcccgagtagctgggactacaggcgcctgccaccacccctggctaattttttatttttagtagagacggggtttcaccatcttggccaggctggtctccaactcctgaccttgtgatccacccgcctcggcctcccaaagtgttgggattacaggcgtgagccacagcgcccggcccagttttgttttcaataatagcatctcacccccaccctggctgcgtctgctcagtattccagagtccacgatatgtatggttcagccctccagaaaataaagtctcctgcatttttttttttaatgctgcagcaagaatagggtcctgggttcttttttagtatgagggagagacagccacctggctacttgggataggaaagaaaatctggtgtttcaactacgtttgtacaaaatgtcaaccatttcttcctattttcagccccaccatatgctcctgccttcacaggtacctgttgcctccaatttctgagtgttttcctttaattattttgtttcatgttaactccttacaacaagtttggtggctgaataaccttgggcaagttgtgtagtttctcatatactttagttttatcgttgtctgtaaaatggagatgagtcttcagattattgtgaagataatttgtttgtttgttttttggagacggaggcacgctctgtcccccaggctggagtgcagtggcacaatctcggctcactgcaccctctgcctcccaggttcaagcagttctcctgcctcagcctcccgagtagctgggattacaggcgcccaccacctcacctggctacttttttggtttttagtagagacggggtttcaccatgttggcccgggtggtctcgaactcctgacctcaggtgatacgcctgcctcggcctcccaaagtgttgggattacaggcatgagccaccttgcctggccaaagattaattgttaatatacataaagcgcttaacaccatgccaggtaccttagtaagtgttcgatgaatatttgctttttgtattagccataatcattctcaggctgctttgtcatttacttgttccacaaattcttagcttccaaaattttggtgatacctcatttcctattctctctagttgcctttgtccatgtagattttttgaggaagcttgggtaaataagtgtattttaaactattatgtttaaatcgaagttccttttatctgttttctaatagaaacatttaaatagcattaagaacttgtagcagtataaacaatatgtttgagaagtactatattgtgaaaatattttcacttttatacagttttttacttatttactgtcttactaatcttcctaagactttttaaagtgaatatttttaaggcagttctagaagaatgaaaactcttatgatatctgtaatagaattgaatacatatttaactactaaatcaatatatttattaatttgtccagatttctgctaacagtactcggcctgctcgctggtataccaaacttggattctttcctgaccctagaccttttcctctgcccttatcatcgcttttcagtgatggaggaaatgttggttgtgttgatgtaattattcaaagagcataccctatacaggtatgatgtattcttgaaacttaccatatatttctttcttttgatacaattaatttgtttgtttgtttgagatggagtttcggtctcttgcccaggctggagtgcaatggcgtgatcttggttcactgcagcctccacctcccgggttcaagtgattctcctgcctcagcctctcaagtagctgagccaccacacctggctaattttgtatttttggtagagaaggggtttcatcatgttggtcaggctgatctcgaactcctgacctcaggtgatccactaatctcagcctcccaaagttctgggattacagatgtgagccactgtgcctggcctgatacaattaacttgaatgttatatatgtgacttttttggtgtgtgtaacacattattacagtggatggagaagacatcatctggattatacatatttcgcaatgaaagagaggaagaaaaggaagcagcaaaatatgtggaggcccaacaaaagagactagaagccttattcactaaaattcaggaggaatttgaagaacatgaaggtaaaattagttatatggtacacattgttatttctaatatgagaacaaagtcttagagactttgaatttaacatttttaatgagtaaattgtttttattttgagtagtaaattgactttattttttagtatctagggtattcttttttggtgttagacaaagaatagcaacaagggacagaaatatcaggtctaagccatttgtaatatttttcctgaattcttacctatatgatgtggcttttgcatttttgtcatggtagttattagctttcatgtgttattatgcctggaactaggacctattgtggtgtcaattttaatattaaaaatcatggtgttttgatgtttatatgacataaattttattttttcgtatctcccttttgttgttgctgaagattttatgtttttctgcatttcctcatgatttatatagatgtaacatgttctataggacatgtaatttacatgtcctatagaactataagttacatgtcctatagaacttacagttctatagttatctgcagaaatattgctccttatgctttatttgcttaaaattatcactagatcatactattttcataaataaatgaatatgaaatcattcacaggcatacctcagagatactgtggatttgattctagaccaccgcaataaagcaaatattacagtagagcaaatcacacgaatattttggtttcccagagcatacaaaagtaatgtttacactatagcataatctcttaaatgtgtagtagcattgtatctaaaaaaaacaatgcacataccttaatacactttattgctaaaaaatgccaatgatcatctgagccttcagtgagttgtaatatttttgctggtggaggatctttcctcaatgttgatgcctgctgagtgatcagagtggtagttggtgaaggttggggcagttgtggcaatttcttaaaataagacaatggcatttgcaacattgattggcttttcctttcatgaaagatttctctgtagcatgcaatgctgtttgatagcattttatccatggtagaactgctttcataattggagtcaattctatcaaactctgctttatcagaatattatgtaatattctaaatcctttgttgtcatttcaacaatattcacagcaccttcgccaggactagattccctctcaagaaactactttctttgcttatccataagaagcagctctgtattaatctgttcccacactgctataaagaatacctgagactgggtaatttctaaaggaaagaagcttaattgacttacagttccacatggctgaggaggcctcaggaaacttacaatcatggcggaaggcaaaggcaaagcaagtacccttttcataaggtggcagaagagagagtgcaggggaaactgccacttgtaagccatcagatctcataagaactccctcactagcacaagaatagcatgggggaaaccacccccatgatccaatcacctcccaccaggtctctccctcaacacatggggattacaatttgagatgagatttgggtagggacacagagccaaaccatatcattctgccctggaccctcccaaatctcgtgtccttttcacatttcaaaaccaatcatgccttcctaacagtctccgaaagtcttaactaattccagcattaactcaaaagttcaagtccaaagtcttcatctgagacaagacaaatctcttccacctatgagcctgtaaaatcaaaagcaaattctttacttccaagatacaatgggggtacaggcattgggtaaatgttcccatctcaagtgggagaaattggccaaaacaaaggggccacagtccccatgcaagtccgaaacctagccaggcaatcaatgaatcttttttttttttttgagacagggtcttgctctgttgtccaggctagagtgcagtggagagatactggctcactgcaacctccgcctcctgtttcaagcaattctcatgcctcagcctcccaagtagctgggattacaggtgtgcaccaccatgcccagctaatttttgtatttttagtagagatggggtttcaccatgttggccaggctagtcttaaaactcctagcctcgctgggtggggtgtctcattcctgtaatcccagcactttgggaggctgaagtgggcagatcacaaggtcaggagttgaagaccagcctggccaacatggtgaaaccctgtttctatgaaaaattcaaaaattagctgggcgtggtggcacgcgtctgtaatcccagctattccagaggctgaggcaggagaattgcttgaatccaggaggcagagattgcagtaagccaaaatcacaccactgcactctagcctgggcaacaaagcaagactctgtctcaaaaaaataaataaaaaaaaataataaaaataactcctagcctcaagtgagccactgcacccaggccagtcattaaagctctaaaatctcctttgactccatgtctcacatccagggcatgctgatataaggggtgggctcccacggccttgggcagctctgccctttggctcttcagtctacagcccctgcagctgctttcatgggctgccattgagtgacagctgcacagtgcaggctgtcagtgggggatgatggccctcttctcacagctccactaggcagttccccactgaggactgtgggaggtggctccaaccccgtatttccctcacagtttccctcccggtttccctcctgtactgcactaacagaggttctctatgagggctctgcccccacagcagacttgtgtgtggacatcctggcacttccatacatcctctgaaatctaggcagaggctcccacagctgaactcttgtcttctacatacccacaggcccagcatcacatggaggccaccaaggcttagggcttgcaccctctcaagcaatggcctgatctgtaccttggccctttttatcaatggctggagctggagcaagtgggacacaggttgccatgtcccatggctgcacagagcagtggggccttgggcccagcccacaaaaccatttttccctcctaggcctcaaggcctgtgatagaagggtctactgtggagatctctgacatgccttggagacactgtctccattgccttggctattaacgtttgtttccttgttacttatgcaaacttctgcagctggcttgaattctttcccgggaaatggatttttcttttctacttcatggttaggctgcagattttccaaacttgcatgctctgcttcccttttaaatataggttccaatttcaaaccatctctttgtgaacatgtatgactgtgtttctagaaaaagccacatcacaccttgaacactctgctgcttagaaatttcttccacaggataccctaaatcatctctctgaagttcaacattccacggatctctagcgcaggggcaaaatgccactagtctctttgctctaaagcatagcaagagtgacctttgctccagttcccaataagatcctcatctccatctgagaccacctcaggctggacttcactggccacatcactgtcagaattttggtcaaaaccattcaacaagtctctagggagttccagactttcccacatcttcctgtcttcttctgagccctccaaactcttccaatctctgcctgttgtctagttccaaagtcacttccacattttcaggttatcggtatagcagtcccccactcctggtaacaattatctgtattagttcatcctcatactgctataaaaaatacctgagactgggtaatttgtaaaggaaaaaggtttaattgattcacagttccacatggctggggaggcctcaggaaacttacaatcatagtggaagatgaaggagaagcaagtaccttcttcacaaggtggcaggaaagagagtacagggagaactctcacttttaagccatcagatcttgtgagaactccctcactatcatggaacagcatgggagaaactgcccccgtgatccagttacctcccaccaggtccgtccctcgacacgtgaggattaccgttcaagatgagatttgggtgaggacacagagccaaatcgtatgaagctccttatcatttaagttttattgtgacattgcagtaattcagtcacatcttcaggctttacttctaattctagttctcttgctattttcaccatatatgcagttacttcctccactgaagtcttgaaccccccaaagtcatccatgagggttggaatcaacttctggtaaacttgttaatgttgatattttgacttcccatgaaacactagtgttcttaatggtatttagaatggtgaatcctttctggaaggttttcaattcactttacccatatctatcagagaaatcactatggcagctattctttataagacatgtttcttttttttttttttgagatggagtttcgcacttgttgcccaggctggagtgcaatggcgtgatcttggctcacagcaacctctgcctcccaggttcaagcaattctcctgcctcagcctccggagtagctaggattacaggcatgtgccaccacgcccggctaattttgtatttttagtagagacggggtttcaccatgttggtcaggctggtcacgaactccggacctcaggtgatccacccgcctcggcctcccaaagtgctgggattacaggtgtaagccaccgtacccggcaagacatgtttcttaaataataagacttgaaagttgaaatgactccatgatccatgggccacaaaatggatattgtgttaggagtcatgaaaataacattaatcactctatacatctctgtcagagctctgtgacagagacatgaagtgagcacatactgttgcgaaaatggcgccagtaggcttgctcaacatagtttccacaaaccttcaatttgtgtttttaaaaaaatgcagtatctatgaaactcagtgaagtgaaatacattaaaacaaatatacctatgttaactcacatattactgtaattaaactctgtatgactttttttttttttaaacatgagtacactggtttcaaaatttcctggaaaacttatagcaggccaggtgtcatgggtcacatctgtaatcccaacagtttgggagtccaaggtggtggatcacttgaggtcaggagtttgagaccagcctggccaatatggtgaaactccgtctctaccaaaaatgcaaaaattaaccgggcatgttggatgtgcctctaatcccagctactcgggaggctgaggcaggagaaccacttgaacccaggagacagaggttgcaatgagccgagatcacaccactgcactcccagattgggtgacagagtgagaccctgtctcaaaaaaaaaaaaaagaaaaaacttttagcagttatatagtttcttatctttaaatctcccttctttgggtgttttatgcttggttctttagttttagttgcttttgaatttacagtttagtgaattaataatccttttgttttcttagaaaacacaacaaaaccatatttaccatcacgtgcactaacaagacagcaagttcgtgctttgcaagatggtgcagagctttatgaagcagtgaagaatgcagcagacccagcttaccttgaggtgagagagtaagaggacatataatgaggcttgatgattattcaaggtgagaagctgttttagactctctggccatcacaggaaggagtatgttgaaatgctgcatttctcaaaagggatgtgtacatttctgggattttcagtgatgtgccagacgagtgtggtggtatgttttcaactatataccgagtagaggatgggagggttctagaattttatatattaattaaatttggtttaaaatgcaggcaaaacttgttttatttttgtccctcctgtactctgaagcaaaaaaacttttttatttttaagataaaacaaatatcttcaaagtaatggcttagtttccatgttcttagctgtttctcaagtccttcctggagtgtacttgataatcctctaccctaagggtacttgggtagaaatgtttccgaagcactaaactgttagaagtagcataggctttagaatcgtggcactctcattttattagcaaagtaaatgacaataaaatagctggccaggcgcggtggctcacgcctataatcccagcactttgggagaccgaggcagaaggatcacctgaggtcgggagttcgtgaccagcctggccaacgtggtgaaaccccgtccctattaaaaatacaaaattagccaggcgtggtgcacatgcctgtaatcccagctgttcgggaggctcaggcaggagaatcgcttgaatccaggaggcagaggttgcagtgagccaaggtcatgccattgcactccagcctaggcaacaagagcaaaactccgtctcaaaaaaaaaaaaaaaaagctattaaatgggcgtaaaatgttgttttaggatcaaataaataatctatataaaagttccatataaatgttagttactattattagaacataattttatatattaaactacctcctaaatttttagacaggtagatagctaaaaaaaaattcaaattctaagattagtttgttagggaggaaggagcaaatattttaccaaaactacttgtttttaattgattaatttcattcacttgatgacttagtaaatcttgtgaatatagccttaaatttcttaaatagtgggactacaaaataaacaatatttcatcagtaatgtaagcagtgctatactgagtagaattccctcctgttccgaaatgttacaatttgggttctccctgtgagaagtgagtccggttttaaaacctgtgagtatacttgctgcaggtctgaaaatgaaggctttatgattctttcttgaaaaattatttgcctctatcttttataatattatttgttgaagcttgtgcattctatgaatcatcatgaagatagctttaatttcatccacaaaatttaacaatatttttttgtctggacataagggggcagaataagagttggagtagggccttgcccagccactctgtaactggacaagtgatgtatttatttcttaggacctcatttccaccttctatcaagggaaaacctaagagtaggttatctttagggttctaagtgcctatgagtctatgagatttgactttattaaagttatctttgtaattctttgaggagaacgtaggcatccatttttaaaacagtcctgttagaatttgttttcagtaacaatgttgaatgatggccttttgaaatcaggttttacaacaaaattgtttaaacactgcctgcatatttagaatctctatacctatattaagatacagagattggatagtctcccttttcagtatagataatctcccttcccggtagagattaggatattaagatgtataatatcctaaagtgtagcagcagtctggtatgttacatgtctaaattccatttcctattttatttgtttattgatttatctgtttatttttgttacactgggtaagattcccaagaggtacaagtagaaatttgctaaagtgagtaggacagaagtgtagaggcaaacataaaagtatgtttagtacatatctgttttaaattgtatctactatttcaaagttaatggaattatactcctggggctaagaatgagggttctagggccaacctctactacctatgtggcttgtgcaaattagttgtcccctttgtgcctcagttttacctacaacacagaaacaatgatattacctaccccatggactgttgtgaagattaaatgaattagtacatttactacacatagatctatttctcaaaataatgagcattcagatattagccatctgtaatgtagttggtgatgattatgattattagagtacatttataattggaggatcatttttgccgtagggaaatagaattattaatagtttgaggcacctgagaatattatgtgagaaactgattacattaaccacacccttaagatgagctctaattttgttgtatttgtcctgtttaaagccatctagttacaatagatggaacttttttgttctgattgctttttattccaatatcttaaatggtcacagggttatttcagtgaagagcagttaagagccttgaataatcacaggcaaatgttgaatgataagaaacaagctcagatccagttggaaattaggaaggccatggaatctgctgaacaaaaggaacaaggtttatcaagggatgtcacaaccgtgtggaagttgcgtattgtaagctattcaaaaaaagaaaaagattcaggtaagtatgtaaatgctttgtttttatcagttttattaacttaaaaaatgaccttactaacaaaatgattataaatccagataaagtataaagttagtttatatcagagaagcaaaatccactactaatgcccacaaagagataatataaaagaggatctgtatttattttgaaacaaacatttaaatgataatcacttcttccattgcatctttctcatctttctccaaacagttatactgagtatttggcgtccatcatcagatttatattctctgttaacagaaggaaagagatacagaatttatcatcttgcaacttcaaaatctaaaagtaaatctgaaagagctaacatacagttagcagcgacaaaaaaaactcagtatcaacaactaccggtacaaacctttcattgtaatttttcagttttgataagtgcttgttagtttatggaatctccatatgttgaatttttgttttgttttctgtaggtttcagatgaaattttatttcagatttaccagccacgggagccccttcacttcagcaaatttttagatccagactttcagccatcttgttctgaggtggacctaataggatttgtcgtttctgttgtgaaaaaaacaggtaatgcacaatatagttaattttttttattgattcttttaaaaaacattgtcttttaaaatctcttatgattagttggagctaccagttggcaaatttgctagctaactagtgatctgaaagtaagcctctttgaacctctgatttttcatgaaaagcaattctctcaattctatattatttcaagggtaacaagttacatcctagtctgtgtacttaattttatagaaattgtccttaattttattttctgcaatttatgttttcttactatttctggtgtatgtgtttatcccattgtgatgttatattggtgtcctcaatttatttccttagccatacactctacttttcattgtacagggctatttattatctcagagtcaagcttttttttttttttttttttccccgagatggagtctcactctgttgcccaggctggagtgcagtggcgctatctcagcccactgcaagttctgcctcccaggttcacaccattctcctgcctcagcctcccgagtagctgggactacatatacccgccaccgagcctggccaattttttgtatttttagtagagtcggggtttcaccgtgttaaccaggatagtctaaatctcctgacctcgtgatctaccagcctcggcctcccaaagtgctgggattacaggcgtgagccaccgtgcctggccagagtcaagcttttattttattgaatatatggtcttactaagttcaatagcatgaatctgttgtgaagaattcaagaattttcttctatttgttgagttttgttttcttaggagttttgctctttctcttttgctgtgttttctccttattttttaaatgtgtttgtgtttggtgagttatgttttagtgcttcgtaggtttttctttgactatattatattagtaagccacattgttcccatgccattttatttcatcttggtcatatttggatgactcttttcacacattttattgttattatagaaggtggataacttttgttcatttaattcatcaatatttatttaatgactgttatgtgctagacagtgttttaagtgctgggtacatagcgattaacaaaacagataagaatccctaccctcatagagcttacattatgaggttgggggagggagattacaaacaaagaaataagtaatatacatgtgtatagtttttttagtgctcagaaaaaaaattaagtgggtaagggggtaatgtcagagaagagagagggatgtaattttagattgagaggtgaggagagagacctccctggaaagctgacatttgagtgaagcttgaaggaattgagggagtgaggtgaggcatgtggccatctggggaaagctttccaggcaattacaaaggccgcagtacagcaggatcatgcctagtgtgccgtgaagcattggcagagaccagagagtgagaagtaacatccagggacagaggcagtgaagagccaggtcgtgtgggggtccttgtgtggactgtaacttcctgtgatgacaggaagtcacaggaaaattccaggtagagggacactgtctgacaggttttcacagaatcattcaggccactgtgttgagaataggctgtagggggcacaagagtacaaacaagccatttggaggctctttcaagcacttaggcaaaagatgatgaaccaaacaaaagcaatggaagtggtgagaagcagtcagattcttgttgtattttgaaggtagggggacggtgcaggatggtctgaacattgggaaaaatggaattgccacttagaaggaaagactgcaagaaaagcaagtatgtggggaagttcaggagctcagttttagacagttaagttttagatgcttattaggcatctaagtagaaatgtctacttgatggttacataggaatctgttcagaggaatggctggatatgaatttgggagtctttactacaaatttttttgtatttttagtagagacggggtttcaccgtgttagccagaatggtctcgatctcctgacctcgtgatccacccaccttggcctcccaaagtgctgggattacaggcatgagccactgcacccggccagtcatacaggggacatttaaagccgtgagactggatgaggtcactgtgggcatgggagtagatagagacgggaagagatccaagacctgattgaagccttttatacttagaagcagggaaatataaatgtaaatataggaatcagtaaaagaaacagaggaatggccagagaggttggaggaatactggagtgaggtatgctgaaagccaagagaaaaaaagaattgtcgagtagtgagagtgattaagtctgccaaatgctatttcatagaattgataatgaagtgaggaccaagaattgatcattggctttaacaccgtggaggagcactttcagtggactgaagtggggcaaaggaaatggagggaaaggaggaatgatagtgaatataggcatttcaaggatttttgctttaagagaagaagagaaatgaatcagtagccagaaggggaatcaggatcaagagaacatttgctttttcagttgaaagtgctaatagcatactgatgagatactgtatgctgatgagaaagatccaataaagaaggtaaaatgcaagatggaagcaaaacaggaacagctgtggggcactgttctcagatactgtgtggtatggtatctagaggctctgttgaaattggccttagctagcaggagagactgttcatctgtaatcacaggaaaaaagtaaagtacgtaggtatagataccaatggaagagttgatatacaagaggaaacttgtggcagacctcttttgattgctctatttcctcgctgaaacagggcacaaaatcatcagctgagagtcagaatgaagaaaagggggccaggcgcggtggctaacgcctgtaatccagcactttgggaggccaaggtgggtggatcacgaggtcaggagatggagacaatcctggataacacggtgaaaccccgtctctactaaaaatacaaaaaattagccgggtgtggtggcgggcgcctgcagtctcagctactcgggaggcagaggcaggagaatggcgtgaacctgggaggtggagcttgcagtgagctgagatcacaccactgcactccagactgggagattccgtctcaaaaaagaaaaagagaaagaaaagggtgttgaaggtttgagagaagaggaaaggcatgaaatcattatctaagaaagtggtagagtaaatggactaagtaaacacatcatgactgccagggcccactggaggtttaatgttcatgaatatattgttgttgtgtgatattttttcaaccgtgttcagctctgatggtgtgggcatgaagtagttggaaagtagaatttaaccaggtctgtagtttagctgggtaagtaatgcaaagcaagaagggcaaagaatttgggggtatatgcaaaaggaggatttaaataattgaccttggacacaatgcagagcaaagaagagacattagaagacgtggatcaatgaacaggagataagaaaagctgattgtaggtcacggtgggtttgagttagggttttagagggagtgaactgggcagatcaaaggtaggtggttgaagaaggaggtacttcaaattgagattctgggggaaatggagttattggaaataaaagtcttgggtatgtccattgcagtgagttaccagtggaaaatagaggacatgatcatttaggaagaaaacaaggaacttgggagcaacagagtattggaaggattgcctgtgaggatactgaaatttccaggaaacatgaccatcgtgatgacagaatgacagtgagttatgagttaaaatcttcaaggaatgaaaggcaatgagtgagccagggtcaatggatgcctgtagcaaggaacagtaatgaatgacagtctgataacacgaggttcaaaactgagtgtttttagagtgggaggagcagcaatgaagcatgaggaagacatctgcctcatctcagcctccagtagcacaaggtctgcaggggcaactgtacaggcagacaagaaccaggtttgttgcaacaagatggcaatgagagcacctgcaggaaagggtgacggtagtggagatcttactgagttccagaggccccattgaaaggattcgaggagatgaagaggtaggaggagatggtgcccagaaaggccacatccaaagcctggaagcggaatccagggaatttggcatgactgagagcctgtgctgccttttttaaatgttttaatttttgtgtgtttatagcaggtgtatatatttatgggggagcctgtgcttgttatggggactgacacagatcagctcttggccccaaggcaaggtgtgtgggagaagaaaaagtgaggaggcctagatgtcagaggagtccggctaaaccactgcagaactgctgcctaattcacagcaaccatgagtaaaaatgctgatgatcatcaggtcaaggatagtctggagcagttaagatgttactttacatgggaggtatcaattaaagatgatgaaatgcctgatttggaaaacagagtcttggaccagattgggtttctagactaaatacagtgtgggaatacacaatacacaacctactagcctatgtgaaacacccgaaaggccagaatgaggaagtgctggagaacttgaaagaagctgaagacttaatccagaaagaagatgccaatcagatttgagaagcctggtaacctggggcaactttgcctgggtgtattaccacatgggcagactggcagaaacccagacttacctggacaaggtagagaacatttgcaagaagttttcaagtcctttctgtcacagaatggaatgtccagagatggactgtgaggaagaacgggccttgctggaatgtggagggaagaattatgaacaggccaaggcctgctttgaaaaggatctggcagtggctgctgaaaaccctgaactcaacactgggtatgaaatcaccgcctgtcgcctggatggctttaaattagcaacgggggatcacaagtcattttctttgcctaccctaaggcaggctgtcaggctaaatgtagatgatagatatagtaaggttcttcttgccctgaagctttgggatgaaggacaggaagctgaaggagaaaagtactttgaaggagctctggccaatacgtccatgcagacctttgtctttggatatgtctttggatatgtcttctcttcttactgaagagaagactttgtggatgaagctcttgagctcttaaaaacctccttgcaggcaactcccacttctgccttcctgcatcaccatatagggctttgtgacaggacacaaaagatccaaatgaaggaagctaccaacaagcagcctagagggcagaacagagaaaaggtagacaaaatgataagatcacctgtatttcatcttcaatctgctgtggaacaaaagcccacatttgaggttgcctatatagaactggcaggaaagtatatagaagcaggcaatcacagaaaagctgaagacacttttcaaaaagtgttgtgcatgaaaccagtggtagaagaaataatgcaagacatatatttgcactatggtagatttcaggaatttcaaaagaaatctgatgtcagtgcaattatccgttatttaaaagcaataaaaatagaaaaaggcataattttcaagggataaaagtgtcaattctttggagaaactggttttaaggaaacttcagagaaatgcgttagacctggaaagcttaagcctccttaggtttctgtacaaattgaaaggaaacatgaatgaagctctagagtactgtgagtgggccctgagactggctgctgagttttagaactctgtgggacagggtccttaggcactcaaatattgaccactttcatatttcatttgattttctgttaacgtgctaatcaaggctgaggtgagtggatcacctgaggtcaggagttcaaaaccagtctggccaaagttgcgaaaccgcttctctactaaaaatacaaaaattagccaggggtggtggcacacacctgtaatcccagctactcaggaggctgaggcaggagaattgcttgaacctgggaagcggaggttgcagtgaaatgagatcgcaccactgcactccagcctgggccacagaacgagactgcatctcaaaataaagaaaaaatgataatcatcttttctgcttgctgttttcagaaacatattatgtaattcactgtaatgatgtaattattgaacagttactcaaatctgataaaatattagttgcattcaataattaatgaatcaatgtgtgtgtgcatgtaagaaaaaccatttgtatgaagcagaaaaaaaatgttaggtagatttgtaggaaacaaaatactggacttacactaaaataaagtgagaaggtcggtgccatgacccagtgtaattcttgactctctatttatccaagattaatttctcccccccttagttacagtgtgagggctggatatttgagtttctattcatgatacagtatgtatccctggaagatgtctctggttctagatcatttttcccagttcagtgagtaacgccgtgtatttatttgctataacaaagaaccatagactgggggcttaaacaacagaaatttgttttctcacagttctggaggctggaaatccaagatcaaagtgttggcagggttaattccttctgaggctgtgagaatctgttcattgcctctctctttgcttctggtgatttgctggcattttttggcattctttggcttgtagatgtctcacctccacctttgcttcattgtaaggtggtggtctcccaatgtacatgtctgtgtctaaatttccccatatattaggacaccagtcattatattagagcctgcccatatgtgtgggtggaggattacccaggtgccgaggcaagagactgaaggcacaaactatttcagtataataaagaaaatagttagattaaggatagtcataatacaaattagatatagagatgatcatggacaattagcaatcattataaaccttaatcattagcttttagtattattctttgctgcattactaatataacctaggaataactggcgggtatagggtgaggtgctgaagggacattgtgagaagtgacctagaaggcaagaggtgagccttctgtcacgcccgcataagggccacttgagggctccttggtcaagcggtaacggcagtgtctgggaagacacccgttacttagcagaccgcaaaagggagtctcatttccttggaggagtcagggaacactctgctccaccagcttcttgtggaagcctggatattacgcaggcctgcccgcagtcatccggaggcctaaatcccctccctgtggtgctgtgcttcagtggtcacactccttgtccacttttatgcttctcccgtactcttggttcctctttgaagttcgtagtagatagcggtagaaggaatagtgaaagtcttgaagtctttgatctttcttataagtgcagagaagaaaacgctgacgtatgctgccttccctctctgtttcggctacctaaaaggaaagggccccctatcctgtaatcacgtgaattgcttcaccttttcaatcacttagaagattcaccctccttaccatgcccccttgtcttgtatgcaataaatatcagcaagcccagccgttcgggccgctaccggtctcccgcgtcttgatggtagtggtcccctgggtccagctgttttctctttatctctttgtcttgtgtctttatttcttacaatctcttgtctccgcacacgagaacacccgctaagccgcatagggctggaccctacacatatgacctcatctttttttttttttttgagttagggtctcactctgttgcccaggctggagtgcagtggtgtgatctcagctcactgcagcctctgcctccccagctcaagcaattattgtgccttagcctcccgagtagctgggacgacaggcacgtgccaccacacacggctaattttttgtattttaatagagctggggtttcaccatgttgcccagggtggtcttgaactcctgagctcaggcattctgcttgcctcagcatcacaaagtgctgggattataggcttgagccactatgcccagcgtgtcttaggatttttcaactttataatggtctgaaaacaaaacatgagtaccttacaactattctttttcacttccagtacagtatgcaataaattacatgagatattcaacacttttttttttaaaaacaggccttgcgttagatgattttgctcaactgtaggctaatataagtgttctgaacacatttaagataggctaggctaacctctatgctcagtaggttaaatgtattaaatgcattttctttttttttttttgagattgaaagtcacatttattgccacgtgaaggaaagccaattaagtcaaattgattaatgtttgcagagtatatctgtttcgatccttttgtttttaatctacctttgtcgaatttaaagtgagtttcctataaggaacaaatagtcgggttataaatttttatccactctttcaatctctgtccattgattggatatttacatcacttacaatgaaggtaattattgatatgccagcattcaactttgtcattttattatttgttttctatttgtttctcctgcttttcattcctccatttctcttttcttgccttcctgaaggttacttaaatatattttaggattccatcttgatttatttttagtgttttcaggcatttttgtattatttttgtagttgtttctctaggtgttacaacatacatgtatgacttacagcagtctactagtatcaatattctaccactctaagtgaagtgtgagaattttgctttcattttgattttggagggaaagggattggatagtgaccatatacagacctttttcttccctacttttaaatactattttcttggatatcatagtattattatttttgttttagtcatcaaacataatttataaactgcatgaggaaatgatagcttatcgtatatgtccatttctcaaactctttccattgtttcttcctccatcctattgtcctcagtcctgatgctctgagagtcttcctttaatcttctcttttctgtttaaacaatttcttttaggcaatttttgagttagagaaaattcttttagttttctctcatctcagaatattttatttctcctttattccttgagaattgtttcaggatatagaatttgtagttgataattctttctttcagtacttgaaaaatattgtgccacttccctctggcctctggttttagatgagaaatctgtcatcattccaattgatgtgtccctatttaaatgcattttcaactaacaacgggtttattgtgacataaccccatcataagttgtcctcgactgtgtttccagataaggctgcattcacaggtactgggaattagtcacaatgtatcctgtaacatcctggaacctttccttatgtcagtcagtcctggtcacctgtttggtccctggcagttttttctcatttctgttcagaagaagaaaaaggtaaagattcttcagatttaggaataacagaattctcaaaaatgtcattttaccagtttagttggggaaggagattagactctgagccttcctgtgcttagttctatccataatcttctgtttcttaatcaccagattttaaattttatatcatgatattccacgtttgtagattttgggtgaatgtttcctttttaaaatttaatttgtttttaagtgttaaagttctattagaaagtttcaaggagccaccttaaaccagaagtctttaacacccagatctagtcatgatgcctcccagcttaaaatcttcagtggtcccctgtcccttagaaaatgaaacccagactcttttgtatacccccaaaaccattcaacttcctgccttaaaccaccaccatacacacgtcagctaaactctaattttaggctgggcgcagtagctaatgcttgtaatcccaggactttgggaggctgaggcggctcgcaaggctaggagtttgggacaagtctgggcaacagtgagattctgtctctataaacataaaaactaaatttaaaaaaaaaactactttaaaacataataataaaacaaactgtacaagttcatattcctgatgcatgataacatttaatgcttcctacctttaaaaatcttctttgttttgcatagatgctcttttgttctccccctcttgatgaatttgtcctattcattattcagctcaagtattacctccctagtcagatgcttacagtctgggttagatcctccttcctccagcttttgaagcattttgttggtttggctgtttcagcacttgtcacatggtccatgatcctacctgtacacttctgaataagccacctactagcctcagtaatacaatgatctcttcaaggacagggactctgtttggatttctacttccacttctgacataatgggttgaagcaggggtcagttgttgaaaactccaggtatgcagcatctcatacggtcctcatagtcacactgttcatttgctattatcatcccactttacagatggggaaactggagctcagagaggttaagtagcctgctcagggtcacaatgctataaattgatttgaacttatactttcaggccctaaagctcttaggttctttcttatacttcatgctgacaaaacaaaagcaaactcaacatttgagagttgggcttaaaacagggacatctgtatttttaatctaatgctttgttactgtattacagaaacactgtgatatataatgagttaattaaacgagaacctttcttaggttgggaaagatttgttttggggaaagcctgtttccctgggaaacagacttacagatttcatgtaggagattagaaaatgcccttaggaacagcacttgtgaggaagcaaatgcagcaggattgggcagaagaagaagaaaggttcagttagtcccacagggacttctggagctgggtggcccttcagagtcttgctagcctgaggcaagagccagtccttgcatactggctcctccagggaggggcatagccttaagcaagacaatgcctttcgacagagggcaagtccaggagggaactcagaggtgagttgtcaatagctagctctccccagaagctggaggatcacatgccttggtcctgaaggggatctgcacccgcaccatggcatccactccaggtggaatcggtgacagtggttttataaattgctaagtcctttattgtttcagtgacattttctaaaaggaattaaaagctttgaagaattctatgcaagttcagagtaggccagaccacaaagctgcaaaataagtttcttcttttccttttgtcttgtgaagatttacctagtgtaggattctaaaagtgttacactaaaaattcttccagttgttatcagttgtatgataattaaagaaataaggcttccatttcttttgatggaatttgatccagacatggaaacctccacttacgtaaaagtgcaatgaggaaactacactgtttactttttatttttctgtattctaaatgtttttcaataaacatgtattttatatttggggaaaacaagatatatttaaaaaggacatttgggagaaggacagtactatcatcaagttttgaatataattagaggcaagttccaaaattagaaaatggaacatgcttgagaaacttataatttctttaaaagcagtgtttaaaattaagatccattaaataaatttgaaatgaaaagaaagaaaagatgaaccatcatttgcaatagaataaacaaatccttatctgagaatgacatttccattccctgttatttacaacggatacataattctcagagtaacaaaaacaataaagtataaagagtagaattaaatgcttagtgcctcttccaactccagctttcctagcctcagttctatcctggtttatcccaggatagaatggatagcacctacccatctttcactttagaattttataactcttggctaggcacagtggctcatgcctgtaatcccagcactttgggaggccaaagcaggcagatcacttgaggccaggagttcaagaccagcctggccaacatggcttgaacccgggaggcgggggctgcggtgacccaagattgcaccactgcaccctagcctaggccacagagtgagactgcgtctcaaaaaaaaaaaaaaaaaattataactctttattttgaactaatttcagacctttaaacaagttgcaaaaatcgtggaatttccaaatattcctcacctagcttcccctaatgttaacatcttgcataaccgtagtacaattagaatcagaaagttaatagtggtataattattacccatactgtagatgtatttgaaaaattgtttgagtttaaggtattttaccctgtttccccttttttgttctgggatcccaaattgcatttagtcatttttcccctgtattttctaccagtctttaatacttcctgtcttctttttcatgatcattatgcttttgaatagactgataatgatcattatgtttttgaatagactgatcaattattttgtagcattcccctcaatttgagttcgtctgatgttttctcatgactaggatgaagttatgcatttctggcaagactaccactgaagtgatgatgtgtctttctcagtacatcatatcaaggggttaatgatactgatcttaatcacttgattaaggtgataatctgctgggtttctcctctgtacaataacttcctttttctttgtagttaataaatatcttgagggagattctttgagactgaatcctatttcacatcaaactagcattcatcagttgattttgtttgcaacaatgattactgtggtatttgcctaattatgatttttctccctttctttccttctacattaattggaattctataaggaaaagctgtgccctttccaccaatgtatttatttggttatttatatcagtatggactcaagaacatttattttattctgcaggttaaaatttggtaccttcattattttattgtttaactttttttttttagctttgaccattaggagctttctcatatggactcgtgtgttctttcaaccagctttcttcactttttgaacacttccttattttttgacatcacaagatgttccaagttcatcttatatgttccctgccctagtcttggaatcagccatttctcttggcttcttttttttagtagaaaatggtgtttagatccaagatctggttgctagataggctcattactttactgtggaggcatcagtactgccaggccctctcagcagacagaggtgggaaatgtttgtcttccattttggattccctcatgtctagttggatttgtttgttggttggtttattgggtatgtgaagtatcactgtggttctagggagtcagacctgtacaaaaagatatacttcatgtcacttcctccttatccttgcagtcccaatcctaatcctcctttttcccccactcacaccctgttcctttagtttctgagtttatccttcctgatttcttttgctcaaatgaacagatacatgtgtattttcttatattcccttcttccttataagaaggggaacatactctagcctttcttttatgcttttcttttttaactcaacactgtcctggagatcagttcatagaaatcgtcctcactctttttttacagctacgtggtacaccattgtttggatgtaccacagtttatccaactctatcctgtatatgagctaataaaagttgcttccaatattttataattataatgtttcagtgagtaaccttgttcataggtgttttcatgaactttatgttcatgtgtattttactattattagaggtctatcttcagagaggagtacaagaaatgggattactgggtgcaaaggtaaatggatatgtgtctttgctaggtattgccaaatttatctccagaaatcttgcacaaatctgtactcctgttagcaatgtgtgcgtatacctgcttccacatgacctcagtaaaagaatgtgttgtcatattggtattgaaattttagcactgtaagcaacaggtcattttggaaaacctgagctttcgccaaattcagctattttgatttgcttttattattagcatataccaaaataaataggcatattagagtttcctttcttgcatcttaaaattcatctaacacatctataataacattcttttcttttttttccattctaggacttgcccctttcgtctatttgtcagacgaatgttacaatttactggcaataaagttttggatagaccttaatgaggacattattaagcctcatatgttaattgctgcaagcaacctccagtggcgaccagaatccaaatcaggccttcttactttatttgctggagatttttctgtgttttctgctagtccaaaagagggccactttcaagagacattcaacaaaatgaaaaatactgttgaggtaaggttacttttcagcatcaccacacattttggtatttttctattttgacagtccagtatcaaggaaatagcttttatacaaattggatagttgaggtagtatgtgaggtaaagtttaatcatatattaattgcccatgaacctcaggagatgggggaatggggaaatgacagcaactagaaagagaagaatgacttgaagggaaatgagttaggagaaattgtgagaaggatgttcagaaatgcagactttgtaagcaaactggaaattggttacaagaataatatgagttatctgtggtttgcagcagtcagcagtgtgattagttaataatatagagactacaggtttacatttaaactccatatctagtgttttatacagattatatttctttgacttgatttaatcccagataagagacactgatattattttccctagatcatgtatgcattttctgcttaaatctatatatacattatataatattagctggtgtttattgagtgtttactatgtgtcagaccttgttctaagcttctcatttaattctcccacaaccttatgaggtagggaactgtttttctattttatcagtgagaaacaggttaaatggcttgccttaggtcaaatgccaagttagtaaaactaggattcatacttaggccatcgaatgcagaacccagactaggaactgctatgcaatgctgcttcccagtaaaatttgagatttcatgagttggtaactagtgaagaatacacaaaaaataagcctcttaattctgtagtttaatatttgaaatgtgtgttattcagaatttatataaaaatatattttaaaagcattagagtagctgtataaagaaagctgtgttgacattttacctagagactctatgcataatgaataacactctgctatatctagtttctaaattaggggtgggagttgtattcattatttagttcccatacagcatatctactgtttacaccccacattttctttttttctttctttcttttttttttttttttttttttttttttagagacagagtcttgctttgtcacccccaggctggagtacaatagcacaatctcggatcactgcagtgtctgcctcctgggctcaagcgattctcgtgccttagcctcccaagtagctgggactacaggtgcgtgccaccacgcccagctaatttttgtatttttagtagagacatggtttcaccatgttgggcagtctggtctcgaactcttggcctcaagtgatctgcccaccttggcctccccaagtactgggtttacaggcatgagccaccgagcccgcattttctctgagacgtcttcaaaggcagtttactaatcctgctgaagagacaactgtcatttacacagcattttaaagttttacaaaatactgtcatgaattaggttaaaccatatgaaattgctgatatttgaccagttgtgatttctcaagcaacagtttcatgtagtttaacctataaatcatttcaattaattcttggaacagacgtgaggtaggtgaggcaattctttcttttctctaaccaaagaagtacctttatagatgtgagatgattcccagctattaagtagtaaatagagctaggacttgagccccaatcttccagcttcaatccagatcatatgacagcttgctgattaaactagatgacagagaagatctctttccttcagatacacatactttttctctgttcccctctccctatcagctagattcccctaaatcactgatactggttttgtaattttgcatcggcatgtttgacaattggtatcacatttagggtttttcattcttttttggtccaaacttttcatttctgcttttaaaggaaatacttttggaaacataaatatgtgggtttgcaatttataaagcagcttttccacttattttcttagaatattgacatactttgcaatgaagcagaaaacaagcttatgcatatactgcatgcaaatgatcccaagtggtccaccccaactaaagactgtacttcagggccgtacactgctcaaatcattcctggtacaggaaacaagcttctggtaagttaatgtaaactcaaggaatattataagaagtatatatggaggccatcgtatattctgttgtatacctagtaaacatggtaaaatgtaattaaacttaattagaaaatgtggttgttatgtggctcctgtaagtatagttatttagaaattttatttattgaagcaagatatgaaactctgggtgcacactttccaaacaggtgctttcatttacatgtgattgaaaagtgttttttgtcatttatttcactgttccatacaattagggttgtttctaagctgtttgtaagctgtttctaagctatttaagtggttaaatcacagtagatgcaaatcaagctaaagtctttaacattggctaatggctgattcttaaatagctaatacttgctaagggtatctatattaactcatttaatcctcataacaaccctatgagataaaacctaagtcctcacttaacattgtcaataggtttttggaaactgattttaagggaagtgatgtataacaaaaccatttttttttctcatcactgttctaacaaaatgatgttgaagatttaaatgacattgctcaaagacctgctatacattgtttgacttaaagtcacagtttccgagaacctatcaattatgttaagtgaggacttgactctattatcctgattttgtagatgaggagactgtggcatagagagaggttaagcaattgcctaataaggtcacaaagctagaaaagtaggtattagaacccagatagtgtgtgttctcaagatggctttaaaatatttatctttgtttaatctgttaataataaaaaacaaaagattaaagcataagtgacgtcccctacctccttttttatcttttactgtgattattcttcatcttccttccttttcatgtcattttatatgttcttatgtaaaattactttcatctagaataggaataatgtgaactgaaatcacctaacctattaggagttaggggagggagactgtgtgtaatatttgcgtgcttaaatattttcaatgaaaagttactttgatttagttttttatgttactacataattatgataggctacgttttcatttttttatcagatgtcttctcctaattgtgagatatattatcaaagtcctttatcactttgtatggccaaaaggaagtctgtttccacacctgtctcagcccagatgacttcaaagtcttgtaaaggggagaaagagattgatgaccaaaagaactgcaaaaagagaagagccttggatttcttgagtagactgcctttacctccacctgttagtcccatttgtacatttgtttctccggctgcacagaaggcatttcagccaccaaggagttgtggcaccaaatacgaaacacccataaagaaaaaagaactgaattctcctcagatgactccatttaaaaaattcaatgaaatttctcttttggaaagtaattcaatagctgacgaagaacttgcattgataaatacccaagctcttttgtctggttcaacaggagaaaaacaatttatatctgtcagtgaatccactaggactgctcccaccagttcagaagattatctcagactgaaacgacgttgtactacatctctgatcaaagaacaggagagttcccaggccagtacggaagaatgtgagaaaaataagcaggacacaattacaactaaaaaatatatctaagcatttgcaaaggcgacaataaattattgacgcttaacctttccagtttataagactggaatataatttcaaaccacacattagtacttatgttgcacaatgagaaaagaaattagtttcaaatttacctcagcgtttgtgtatcgggcaaaaatcgttttgcccgattccgtattggtatacttttgcttcagttgcatatcttaaaactaaatgtaatttattaactaatcaagaaaaacatctttggctgagctcggtggctcatgcctgtaatcccaacactttgagaagctgaggtgggaggagtgcttgaggccaggagttcaagaccagcctgggcaacatagggagacccccatctttacaaagaaaaaaaaaaggggaaaagaaaatcttttaaatctttggatttgatcactacaagtattattttacaagtgaaataaacataccattttcttttagattgtgtcattaaatggaatgaggtctcttagtacagttattttgatgcagataattccttttagtttagctactattttaggggattttttttagaggtaactcactatgaaatagttctccttaatgcaaatatgttggttctgctatagttccatcctgttcaaaagtcaggatgaatatgaagagtggtgtttccttttgagcaattcttcatccttaagtcagcatgattataagaaaaatagaaccctcagtgtaactctaattcctttttactattccagtgtgatctctgaaattaaattacttcaactaaaaattcaaatactttaaatcagaagatttcatagttaatttattttttttttcaacaaaatggtcatccaaactcaaacttgagaaaatatcttgctttcaaattggcactgattctgcctgctttatttttagcgctatcacaggacccagagcctatgcccttttaaacttaccacaaaagcagaagattaattcaatttaagatgatactctcatttgttacgtcctttttttttttttttggagatggagtcttgctttgtcgcccatgctggagtgcagtggcatgatcctggctcactgcagcctccacttcccgggttcacgtaattctcccacctcaagcctccctagtagctgggattacagggacgcaccaccatgcccagctaatttttgcatttttagtagagactgggttttaccatgttggccaagctggtctcaaactcctgatgtcaggtgatccatctgcctcagcctcccaaagtgctgggattataggcgtgagccactgtgcccggccaatatttgttactttcttaggtttaatagagaaaagggataaaacatttctaactgggagttaattgcatggagaaggtcttaaatcagatgttttaatgccttaaatgtctgtataatatcatgttttcaaatctaattataaatacgtttaaagccaagaataaatcttttaaaaaattga

SEQ ID NO: 31 - DNA, 306675 bp, Homo sapiens
  source 1..306675: mol_type = genomic DNA; note = HGNC Approved Gene Symbol: MSH2; note = Cytogenetic location: 2p21-p16.3; note = Genomic coordinates (GRCh38): 2:47,403,067-47,709,830
gcattttcttcaaccaggaggtgaggaggtttcgacatggcggtgcagccgaaggagacgctgcagttggagagcgcggccgaggtcggcttcgtgcgcttctttcagggcatgccggagaagccgaccaccacagtgcgccttttcgaccggggcgacttctatacggcgcacggcgaggacgcgctgctggccgcccgggaggtgttcaagacccagggggtgatcaagtacatggggccggcaggtgagggccgggacggcgcgtgctggggagggacccggggccttgtggcgcggctcctttcccgcctcagagagtgggcggtgagcagcctctccagtgcggaggcacgggggcggaacgttggtgcttgtgcggattccgccgtccccaggttctgcttggctccggagggacgcccccctcagccctgaaacccgtgcctctccagccgccccggatctgaacttgtgatcacggagtgtttacgtcgtgccaggcattttaatgcattgttctagttcattttccagcagtcgcattcctcgccttggccctacatgtagcgctcattacaaacacggccagaatctcttattaacaaacagcagccaggagtgagatttaaaatagactgggggtttaggagacccttttatgacacgtaattctgctcccacgacgctcccatttataccgccggtccagctaagggtctggtaatggagcgccgttgaagagcagtatgatgaagtggtcaggaccaacggactctggagctgggctgcttgggatcaagtcgctgcccctctgcttattaacgtgtgaccttgggccagtcatggacgctatctgcttcagctcagcattcagtgctctccgtcacccgaccccatctatccaggattatctctccctggaaagctacaaacgtctcaccctatgtgggccaaatgttctggataggcctagttaacctcttctctccctgttttctttgcgctttcttgcagctatgtagttatgctaatgaaaagagcatcctagggggagcagagttgtggattctagtcctgactagaggactagtgcaaatgcgatactcctgatgaaaaatgtttcattcgttagatataaatgtgttaggcagggttatggacactagatgaaaaaagaaatacctctactttcatagagatcactattggacagcaaggcagaaataattacaattcaagttggaggcttatggaggtgagcttgtaagaggttacaagaggcgccaaggcaggatcgccaaagacggaagactttggaagagtctcatacaacggaagaggcgttatatgagacaccaaagtccacgttgagtcttggtggactagaagtttgctagggagagggcttgaaacgaggtagattggcgttgctggtgtagaaaaggaaggagactggcccaggtgggtggggttagatgaccaaaggcttttagtgtggtgttgagctgttgaaattttatgctgtagccaatgaaaagtctgaaatgttttttttttttttttttctgagacggagtcttactgtgtcgcccaggttggagttcagtggtgtaatcctggctcactgcaacctccacctcctgggttcaagcgattctcctgcctcagccaccggagtagctgggattacaggcacgtgccaccacgcctagctaatttttgtatttttagtagagatggggtttcaccatgttggccaggctggtctcaaactcctgacctcaagtgatccacccaccttggcctcccgatgtgctgggattacaggtattagccactgcacctgacctacatagattttacataagactttaaaacagggcgggcgcagtgactcacgcttgtaatcccagcactttgggaggctgaggtgggcggatcacaaggtcaggagatcaagaccatcctggctaacatggtgaaaccctgtctacactaaaaatacaaaaatcccagcactttgggaggctgaggtgggcggatcacgaggtcaggagatccagaccatcctggttaacactgtgaaaccctgtctctactaaaaatacaaaaaattagctgggtgcggtggcaggtgtctgtagtcccagctacttgggaggctgaggcaggagaatggtgtgaacccggaaggcagagcttgcagtgagccgagattgtgccactgcactccagcctgggcaacagagcgagactccatctcaaaaaaaaaaaaaaaaaaaaaaaagactttaaaaaaaattataagaaaggacagaccaagtgcagtggttcgttccagcacttagggatgccaaggtgggaggattgcttgatgctaggagttgaagactagcctgtgtaacatagcgagacccatctctacaaaaaaattaaaaagttacctttagaacttacgatttttatgtgtagactccatataagcagagggtctatgcttattcactatttattaccttccatagtccctgcacatataataggtgcttcataaacaatttaatgaatgaataaattactgagaaaacactggaagtttttgggttagcattgtgttaggtgcttgatatggtctggctgtgttcccacccttatctcatcttgaattcccatgttttgtgggaggtacctggtgggacataattgaatcatgtgggcaggtttttcctgtgctgttctcctggtagtgaataagcctcacaagatctgatggttttaaaaatgggagtttccctgcacaggctctctctctttgcctgccgccatccatgtaagatgtaacttgctcctccttgccttcctcaatgattgtgaggcctcctcagccatgtggaactggctgcagagtcattaaacttcgttcttttgtaaattgcccagtctcaggtatgtctttttttatttttttttgagacagagtctggctctgtggctaggctggagtgcagtggtgcgatctcgactcactgcagcctccgcctcccgggttcaagcgattctcctgcctcagcctcccaagtagctgggactataggtgcacgccaccatgcccagctaatttttgtatttttaatagagacggagtttcactgtgttggccaggatggtcttgatctcttgacctcgtgatcttcccgcctccgccttccaaagagctgggattacctacccagctgggtatgtctttattagcagcgtgaaaacagactaaaacagtaaactgataccaatagagtgggatgcagctgaaaagatacccgaaaatatggaagcaactttggagctgggtaacaggcagaggtcagagcagtttagagggctcagaagaagaccagaaaatgtgggaaagtttggaacttcctagagacttgttcaatggctttgaccaaaatcctgataatgatatggacaatgaaatccaggctcatgtggtctcagatggagatgaggaacttgttgggaactggagcaaaggtgacacttgttatgttttagtaaagagactggtggcattttgccctgccctagagatttgtggagctttgaacttgagagaaatgattttgggtatctggtgggagaaatttctaagcagcaaagcattcaagaggtgacttgggtgctgttaaaggcattcagttttaaaagggaaacagcatgaaagtttggaaaatttgcagcctgacaatgtgatagaaaagaaaatcccgttttctgaggagaaattcaagctagctacagaaatttgcataagtaatgaggatcccaatgttaatccccaagacaatgggaaaaatgtttccagggcatgtcagaggccttcatggcagcccctctcatcacaagcctagaggcctaggagaaaaaagtgatttcatgggccagcccggggtccccatgctgtgtgcagcctagtgacttggtgccctgcatcccagctgccccagctgtggctgaaaggggccaacctagagctcaggccatggcttcagagggtgcaagcctgaaaccttgacagcttccaggtggtgttgagcctgcaggtgcacagaaatcaataattgaggtttgagaatctctgcctaggtttcaaagatgtatggaaacgcctgcatgtccaggcagaagtttgctgcaggggtggggtgctcattgagttcctctgctagggcaatgtagaagggaaatgtagggtcagagcccccccacagagtccctactggggcaccacctagtggagctgtgaaaagagggctaccattctccagacctcagaatggtagatccacagacagcttgcaccatgtgcctggaaaagctgtagacacttaacgccatctcatgaaagcaaccaggcagtgtgctgtaccctgcaaagccacaggggcagagctgtccaaggctgtggttgcccagctcttgcatccgcatgacctggacatgagacatagagtcaaaggagatcattttggagctttaagatttgactgccatgctggattttggacttgcatggggcctgtagcccctttgttttggccaatttctcccatttggaatggctgtatttacccaattcctataccccattgtatctgggaagtaactaacttgcttttgatttgacaggctcatatgcggaaaggacttaccttgtcttgaatgagactttggactggaattttgaattaatgctgaaatgagttaaggctttgggggactgttgggaatgcatgattggttttgaaatgtgaggacatgagatttgggaggggtcatggcagaatgatatggtttggctatgtccccacctaaatcccatcttgaattcccatgtattgtgggagggacctggtgggagatagttgaatcatggggatggatctttcccatgctgttgtgatagtgaataagcctcatgagatctgatggttttaaaaacggaagtctacctgcacaagctctttctttgcctgctgccatccatgtaagacatgacttgttcctccttgccttctgccatgattgtgagacctccccagccatgtggaactataagtccagtaagcctctttttcttcccagtctcgggtatgtctttatcagcagcatgaagtccagctaatacagtgcttgaacatgtaatatctcaaatctgtaatgtactttttttttttttaaggagcaaagaatctgcagagtgttgtgcttagtaaaatgaattttgaatcttttgtaaaagatcttcttctggttcgtcagtatagagttgaagtttataagaatagagctggaaataaggcatccaaggagaatgattggtatttggcatataaggtaattatcttcctttttaatttacttatttttttaagagtagaaaaataaaaatgtgaagaatttaattgtgttttagtattttaagtagattgtgatagtagaatggtttgagacactttaatagcaattagcatgtggtttttaaaaagttgcagtttggctggtcgcagtggctcatgcttgtaatcccagtattttgggaggctgaggcaggtaggttgcctgagcccaggagttcaagaccagcctgcccaacgtggtaaagccccatctctactgaagataaaaaaatttaaaaaaattagctggggctattggcacacacctgtggtcccagctaatcaagaggatgaggttagaggatcacttgagcccaggaggttgaggttacagtttaactttcagaggccaaggcaggaggattgcttgagtccaggagtttgagaccaccctggggaatgtagggagatcccatctctatagagggatagattagatagataatttctgaggggaggggagggggagggccagggaaggggagggaaaggggaggggagggcagggccagcagtaaggtcataatagagacatgtatctgtaagatccttataataggtgaggatggccacaaattagcgccacagatttgtatttttagtagagacaaggttttaccatgttggccaggctggtcttgaactcctgacctcaagtgatccgcctgccttggcctcccaaagtgctgagattacagatgtgagccaccatgcccaaccacaagcatttatttatttatttatttatttatttatttatttatttagagacagtcttgctctgtcgccaggctggagtgcagtggcgccatctgggctcactgcaaactctgactccctggttcaagcttttctcccgcctcagcctcccgagtagctgggattacaggtgcatgctgcaacacccggctaatttttgtatttttagtagagatggggtttcaccatgttggccaggacggtctcgatctcctgacctcgtgatccgcctgccttggcctcccaaagtgttgggattacaggcgtgagccacagcactcagccagttatttttttataagaaaacattttactggccaggcctggtggctcacacctgtaatcccagcactttgggaggccgaggcaggcggatcacgaggtcaggagttcgagaccagcctggccaacatggtgaaaccccatctctactaaaaatacaaaaattagccaggcgtggtggtgtgcgcctgtattcccagctactggggaggctgaagcaggagaatcgattgaacccttgaggcagaggttgcagtgagttgagatcgcaccattgcactctagcctgggtgacagagcaagacttcatctcaaaaaaaagagaaaacattttattaataaggttcatagagtttggatttttcctttttgcttataaaattttaaagtatgttcaagagtttgttaaatttttaaaattttatttttacttaggcttctcctggcaatctctctcagtttgaagacattctctttggtaacaatgatatgtcagcttccattggtgttgtgggtgttaaaatgtccgcagttgatggccagagacaggttggagttgggtatgtggattccatacagaggaaactaggactgtgtgaattccctgataatgatcagttctccaatcttgaggctctcctcatccagattggaccaaaggaatgtgttttacccggaggagagactgctggagacatggggaaactgagacaggtaagcaaattgagtctagtgatagaggagattccaggcctaggaaaggctctttaattgacatgatactgtttcatttaaggaaaaataataaaaaaactcttttttttgtatctaattaaaataatgttctgatgtttacagaaactttgtatatttaattggacattagaacaagctgtttgttgtgtaagatttattttacctcagatcttttctcccccctttcctttctgtcttgtgttccaaaagagtaattattacggtaaatattactgtaattatggatttatcaaataagatgcagttctttagcattttttgataaatcgagtggaactttagcctgttattttactatttgttttattttaactaaattctgattgtgtcattttttttttttttttttgggaccgagtctcgctctgtcgcccaggctggagtgcagtggtgcgatctcggctcactgcaacctctgcctcccaggttcaagcaattcttctgcctcagcctcctgagtagctgggattacaggtgtgtaccaccacacccagctaatttttgtatttttagtagaggtgaggtttcaccatcttggccaggctggtcttgaactcctcacctcgtgatccacccacctgggcctcccaaagtgctgggattacagccatgagccaccatgctcggctttgattgtgtcatttgtataggcatgtggtttattatttagttatttttttttttttctttgaggtggagtatcactcttggtgcccaggctggagtgtaatggcgtgatctcagctcactgcaacctctacctcctgggttcaagcaattctcctgccccagcaggagtagcttgggattacaggcatgccccaccacacctggccaattttgtgtttttagtagagacagggttccaccatgttggtcaggctggtcttgaactcctgacctcaggtgatctgcccacctcagcctcccagagtgctgggattataggcatgagccacggtgcccagcatatttagatttttttttttttgagactgagtctgactctgtcacccaggctagagtgcagtggcacgatccacgatcttggctcactgcagcctccaccttatgggttcaagcgattcttctgcctcagcctcccaagtagctgggactgcaggcacatgccaacacgcccggcttatttttgtatttttatagagacggggtttcatcatattggtcaggctggtctctaactcctgaccttgtgatccacccgccttggcctcccatagttctgggattacaggcatgagccacagcgccaggcctagatgtttcttaaggtatgtatctcccaaagattctttttgtggtcctcaagtaccataagcaccgctggagataacacatgtgatgggcatttttagcatagattgtatctaagcaactttccacaagtaatagttctgttaagggttgttattgtggccgggcgcggtggctcacacctgtaatcctggcactttgggaagctgaggcggccggatcacctgaggtcagggattcgagaccagcctgtccaatgtgctgaaaccctgtctctactaaaaatgcaaagaaaaaaaaaatctagccaagcatggtggcttgctcctgtaatcctagctacttgggaggctgaggcaggagaattgcttgaacctgggaggcagaggtagcagtgagccaagatcgtgtcaccgcattccatcctgggcgacagtgagactctgtctcaaaacaaaaaaagagttgttaccgttgggactattttttgaaagctttatgtgaacgtaattttatattttgatgaaaatttagtttattgatgtaaaaagtgtatcagtacatcatatcagtgtcttgcacattgtataaacatttaatgtaggtgaatctgttatcactatagttatcaatgttataattttcatttttgcttttcttattccttttctcatagtagtttaaactatttctttcaaaatagataattcaaagaggaggaattctgatcacagaaagaaaaaaagctgacttttccacaaaagacatttatcaggacctcaaccggttgttgaaaggcaaaaagggagagcagatgaatagtgctgtattgccagaaatggagaatcaggtacatggattataaatgtgaattacaatatatataatgtaaatatgtaatatataataaataatatgtaaactatagtgactttttagaaggatatttctgtcatatttatctcaaaacctaaactgtgtatcaatgatattaagcttttttttttttttgagacagagtttcacttttgttgcccaggctggagtacaatggcgcgatcttggctcaccacatcctctgcctcccaggttcaagtgatcctcctgccttggcctcctgagtagctgggattacaggcatgtgccaccacgcctggctcatcttttttgtatttttagtagagatggggtttctctatgttggtcaggctggtctcaaactcctgaacctcaggtgatccgcccgcctcgggcttccaaagcgctgagattgcaggcatgagccactgtgtctggcctatttttatagtttatgtacttggaattatataatatattctgcctagcttctttcattcaatatttgtaagatttatccatattattgagtgtagttgtggatttttgcatttatatttcatagcacgagcatgtcagaatttatccattttacttcccttctgcccgccactgctactctccccattttacctttttttttgtttttttgagatggagtctcagaatttcgctctgtcgcccaggctggagtgctgtggcacggtctcagctcactgcaacttctgcctctgggttcagctgcacgccaccatgcctggctaatttttgtattttcagtagaggggattttgctatgttggccaggctggtcttgaactcctgacctcaggtgatccacccaccttggcctgccagagtgctgtgattacaggcgtgaaccaccgtgcccgacccccattctaattttgatggacatttgggtaattttcatttttggctgttataaatactgctgcaattacagttaattttcacagtttttttttttttttttttttttttttttttttgaggtgagtttcgctcttgttgctcaggctggagtgcagtggtgcgatctcagcccactgcaaccttcaccttctggattcaagcaattctcctttctcatctcctaagtagctggggtttacaggcatgtgccaccatgcccagctaatttttgtattttaatttcacagttctggaggctgggaagttcagaattaaggcactggctgatctgttgtctggtgagggcccacttgttcatagataaccattttctcactctaacctcacaaggttgaaagggcctaatttttgtgtttttagtagagacggggtttcactatgttggctaggctggtctcaaactcctagcctcgagtcatccacccgcctcgtcctcccggagtgcttggattacagcatgagccactgcgcccggcccccattttagttttgatggacatttgggtaattttcttttttggctattctaaataatgctgcaattactgttaattttcaccttgtaaaaaccattttcaaatctcaagagattaacctttagttttcttggtttggattgggaaggaacaccaaggaaaatgagggacttcagaatttattttcattttgcatttgttttttaaaatctttagaactggatccagtggtatagaaatcttcgatttttaaattcttaattttaggttgcagtttcatcactgtctgcggtaatcaagtttttagaactcttatcagatgattccaactttggacagtttgaactgactacttttgacttcagccagtatatgaaattggatattgcagcagtcagagcccttaacctttttcaggtaaaaaaaaaaaaaaaaaaaaaaaaaaagggttaaaaatgttgaatggttaaaaaatgttttcattgacatatactgaagaagcttataaaggagctaaaatattttgaaatattattatacttggattagataactagctttaaatggctgtatttttctctcccctcctccactccactttttaacttttttttttttaagtcagagtctcacttgttccctaggccagagtgcagtggcacaatctcagcccactctaacctccacctcccaagtagttgggattacagttgcctgccaccatgcctggttaatttttatatttttagtagggttgcggggacagggtttcaccatgttggccaggttggtctcaaacttctgaccttaggtgatcctcccacctcggcttcccaaagtgctgggattacaggcttgagccatcgtgcccagcctactttttacttttttagagactgggcttggtggagtgaagtggcaagatcatagctcactgcagtattgaactcctgggctcaagcgatcttcctgcttcaacctcatgagtagctgggtctacaggcacaagccaccatgcttgcctaattttaaaatttttgcagagttggagtttcacagtgttgcccaggatgttcgctcactcctgacttcaagtgattcttctgccttagcctctagagtggtagctgggattacaggcatgaaccaccatgctctgctattttttttcaaggtttttttttttttttttttttttgagagactggtatgactatgtatgctccctaggctggagtgcagtggctattcacaggaagtgccatcagagtgtactacagcttcaaactcctgggctcaagcacttctatcatagtctccaaagtagctgggactacgagtgtgtctcattgtgccttgctctcgaattgctttttttttttttttctggtttcaagctatctatgtggtattagtcctcactttatgaataattttgtatactactaatagcaattttttttttttttttttttttgagacggagtctcattcttgtcgcccaggctggagtgcagtggtgtgatcttagctcactgcaacctctgcctctccggtttgggcaattagctgggattagaggcgcctgccaccatgcccagctaatttttgtatttttagtagacatggggtttcatcttgttggctaggctggactctaactccaggtgatctgcctgcctcggcctcccaaattgatgggattacaggtgtaaaccactgggcctggcctagcaatttaaaatgacattctaagaagttttatgtctaaatctgcagtaagtggctgggtgacgtggctcatgcctgtaatcccaacgctttgggagtccagggtgggaggatgacttgaggccaggagttgagaccagcctgggcaacatagtgagactctgtctctacaaaagaaaaaattagcggggcttagtggcgtgcgcctgtagtctcagctactcgaaaggctgaagtgggaggattctttgagccccaagggttctggcttgccgtgagccaggatggcaccactgcactccagtctgggcaatagagtcagaccctgtctcaacaaataaaataaaactgtagtaattataaagtggttttggctgggggagaaatgtacagttgaacatacggattaagaggttgaaagttggtcttaggaagaggaactttttgtggaaatttcttaatatttgaagaatattatgttattgttcctctgtttttcatggcgtagtaaggttttcactaatgagcttgccattctttctattttattttttgtttactagggttctgttgaagataccactggctctcagtctctggctgccttgctgaataagtgtaaaacccctcaaggacaaagacttgttaaccagtggattaagcagcctctcatggataagaacagaatagaggagaggtatgttattagtttatactttcgttagttttatgtaacctgcagttacccacatgattataccacttattgtaatatgcagttttggaagtatatgttaccatttaactgtacagagtacatagtaatagagtggtaattatttagattgattaaagaactcatttttttaaataagttttttttttttcactataaaagtttattttatttgagatggtatggtatcgaacatgttcatattgtgtgtaatcgtgggtaaattactcaacctttatgtcatagtttcttcacctttaaaatgacattaataaaagagctacttaataggattataagcatgagatgatttaatatacataaaatacttacagtctgatatataggaagcacttaactctttatcctagaaaagatttaaggtgaccttaacatatatgtcagaaaatctttaaaattgtggaaataaaaggttgtataattctgctatcctaaaattactagtatttcaatatattttattttagtcttttcttttagatacaagttttaaaacttttaagtgaagtgtaatatacgtaagtactgcttgatgaatttaaggtgatttctaaagccaggtttgttggggaagaggagtgggatttagtgatttagaaccagaaattggggctgggtgcgatgtctcatgcctataattccagaacttcgggaggccatagtgggagaattgtttgtgccccggagttcaagaccagcctgggcaactcagtgagacgccatctctacaaaagaaaaaaaaaaaaaattagctcagtgtggtgacatgtacctgtagcccgagctactcgggaggctgaggtgggaatatcaccctggcccagaagtttgaggctgcagtgggctatgattgtgccactgaactccagcctgggcaatggagtgaaaccctgtctcaaaaaacaaacaaaaaaagaaactgaggctgggcacggtggctcacacatataatccagcacttggggaggttgaggcaggataattgcttgagcccaggagtttgagaccagtctgggcaacaaaatgacaccccatttctaccaaaaaaaaaattgtttaaaattagctgggcatggtggcatgtgcctgtggtcccagctacatgggaggctaaggctggaggattgtttagcccaggaggttgaggctgcagtgagccatattcatgtccctgcactccagcctgggtgacatagtgagacgctgtctcaaacaaaaatcaacaggccagatgcagtggctcacccctgtaatcccaacactttgggaggccgaggtgggtggattacttgaggtcaagagttcgagaccagcccggccaacatggcgaaaccccatctctactaaaaatacaaaattagatgggcatggtggtgtgtgcctgtaataccagctactcttgaggctgaggcatgagaatcgcttgagttgggaggcaaaggttgcagtgagccaagattgtgccactgcactctaccctgggtgagaaacgagattttgtatcaaacaaacaaacaaacaaaaaaagacgcccaaaatcaacaacaacaaaaacgatattggaatgattggatccccaaagataaatgtttgaggtgatggatatctcagttaccctgagttaagtattatacattgtatacgtgtattaaaatattacaaacccccaaatgtgtacaattatgaggtatcaataaaagagattggaaggactgggtaatttgcaagtaattaaggcaatttacaatttttaatttttatttgtgaataagtagttatacgtgtcaaaattcaaaaaggacaggtggatatacagtgataagtcatccccccttctctgtcagctccataaagagcccctgtcttgcatggctccagggtcacatttcctattgtattttgccaccacctgccctgggagcaacagtgttagtttcttgaacatccttccaagcagagtctgggcctacacaagcaaaacaagtatgtctattctctctcctctttaatttttttaaaggaagtgattgataatttaacactcaagctataggtcattggttatatttttaatttccaatttatgggaatagaggaagtgtcagtgatccccttctggtttaagaactggaggatgcatgtgtttagaccctttagaaacctgaaatgtcacctaatataattatcagagtaacactttttagtaagcaagctatctatcaaaagtaggtttttgaagaagagggtaaggaaaggttactttcatgggacatagcaataatttctaaaatctaatggttttacaagacttgttcattagaagtaacatctgtgaggatggctttatgagtcaaaatattatctgcttaataccccacctgtagggtaagaagaaatgtttttttcttggtgacaatttttagcagcaagcggggagggcctgtggcttccaaggccaaacgttgaaataccacagactaggaagaaaaagatccactccttatacaggatttgtttgtttcttcttttttcttcatttttgtagagatgaggtctcactatgttgcccaggctggtctctcttttttttttgagcccgagtttcactcttgacgcccaggctggagtgcagtggtgtgattttggctcaccgcaacctctgcctcccgggttcaagcgattctcctgcctcagccttcctgagtagctgggattacaggcatgcgccaccacgtccggctaattttgtatttttagtagagatgggtttctccatgtgggtcaggctgctctcgaactcccggcctcggatgatccacttgcctcggcctcccacagtgctgggattacaggcgtgagccactgagcccagccatgctggtctcaagcaatccacacccacctcagcttccaaaagtgctggcattacaggtgtgagcccccgtgcccagcctgtttcttataattattcctctttctcaactctgtctgctgtggtacctcatgcttcctagtttaagccttcttgggagttctcaggagaaatctgttatctcccttactaagcatttgggattgatgttccttccaggttactataaaaccaagttttttttggttcttttttttttttcttttaaaagaaatgagattttgtcatggttagcctggtttcaaactcccaagctcaagtaatccaccttcctttgcctcccaaagtgctaggattacaggcatgaaccactacacccgatctgtactgttcctctttccattcactaaaacctacttgcaactatgagcatatgttattgccatctagaaatgagtttctagggacttgttcctttttgtactttatttaaacagtcgaattagaaattattattatcattatttattttttgagatggagtcttgctctgttgcccaggttggagtgcagtggcgtgatctcggctcactgcaacctccacctcctgggtttaagcgattctcctgtctcagcctcccgagtagctgggactacaggcatgtaccaccacacctggctaatttttatattcttaatagaaacagggtttcactattttggccaggctggtctcgaactcctgacctcagatgatccactcaccttggcctcccaaagtactggaattataggcgtaagccaccgtgcccggccaaaattatttataataagcaaggcatggtggcttgtgcctgaagtcccagctacttgggaagctgaggcaggaggatcacaggttcaggtccaccctgggaaaatagtgagaaccttccctatccccagtcttcaaaaaagaaaaaaatttgctggagaaggtcacacaatgctgataggtcccattgtgctttcatgctttctagttttcaatgataactggttgttacttttattgtctgactcattatagtgaccaactcccgattttttactttgccttaagccttcagctatctcctacctctaagcggatgatttcttccttaacacttaaaacctcaaaatttatctgtacttccactcttttactctctggctctttctcagaagaagaaataacacttttatttcttttcaaagccaacctttccatactttacttggagacatatttctttttttttgttttgtttttgtgagtggagtctcactctgtcgcctggtctggagtgcaatggcgcaatctccactcagtgcaacctctgcctcccaggttcaagcgattctcctgcctcagcctgctgagtacctgggcttacaggttagcacaccacacccggccaagttttgggtttttagtagagacagggttttgccgtgttggccaggctggtctctaactcctgacctcccgatccgcccgcctcaggtgcaagccaccgcgcccagccctagtgtagcaatcttaatcagaaatatgtctctggctgggcgaggtggctcatgcctataatcccagcactttgggaggccaaggcaggcagatcacctgaggtcaggagttcaagaccagcctgaccaacatggagaaaccctgtctctattaaaaatacaaaattagctgggtgtggtggcatatgcctgtaatcccagctactcaggaggctgaggcaggagaatcgcttgaacctgggaggcggaggttgcggtgagccaagatctcaccattgcactccagcctaggcaacgagcaaaactccatctcaaaaaaaaaaaaaaaaaaaaaaagattgctatgttaatcttatttatttatttatttattttgagacagagtctcacactattgccagggctggagtgcaatggcataatcttagctcactgcaacctccgcctcccgggttcaggtgattctcctgcctcagcctcctgagtagctgggattacaggcgcccgccaccacgcctggcttattttttgtgttttttagtagagacggggtttcactacgttggccaggctggtcttgaactcctgaccttgtgatttgcccacctcagcctcccaaagtgctgggattacaggcgtgagccaccgtgcctggcttatgttaatcttattttatataaaaagaaataatattaaactagaaggcaataaaaatgccaaattcaatacacaaattattttgtcagcatttccacaagaataaactattttatatgctaacatatgttcaatgttccttacagaattctgacattaaaaatgaaaaattaccaaagcttcagatgaatctataaatggacaaaagaaaaagcttaaaaggataaagagcaacactccaagtgcatgtataaacataaggactcttgggacttaacctttttaaaaatctttaggcctagcacagtatttgctatttaatgtatcaaatgggtggttttgacttcattaatccatatataggacagatgaaaaaaagaattatagacttgtaattacagttctttaggaaccatatttgctctcagccttttaaatacgctgtcaggcaattccagtcagcacttttgaaaaaaacctacctacctacctacctacctatctatctatctatctatctagagactgagttataagactagctagtttttgtattttttgcagagacaggatttcatcatgttttctaggctgttcttgaactcccaggctcaagccatccacccgcctcagcctcccaaagcgctgggattacaggcgtgagtcaccatgcccaaccaattccagtcagctcttaaaatgaaagcctagaaatggtagggttaaagaggggacagaatgttgattttaaaatacctagaatttggccaggtgcagtggctgtaacccagcactttgggaggccaaggtggccggattgccttggcctgcctcagcctcccaaagtgctgggattacaggtgtgagctcaggagttcgagaccagcctgggcaacacggtgaaaccccttctctagtaaaatacaaaaaattagctgcatgtggcggcgtgcacctgtggtcccagttacttgggaggctgaggcaggagaattgcttgaacctgggaggcagaggttgcagtgagctgagattgcgccactgcactccagcctgggcaacagagtgagactctgtctccaaaaaaaaaaaaccccaagaatttgattaattctgttggaattttaagagttaactgatccccaaaatgactcagctgtatgcaatttaatgcaatattaattcgcatgttgactctcagaattgcatacagctgagtcattttattgagtaggattgataagtatactatgttatgccaacagtaactgtgatgcttctaaaattgtgatttttaaattggcattgtcacagaaacagcagagtagttgtttttttctttaagcttcttttagccagaaacataaactgaaactgtaattattactgcaatcgtatgttgaatagacttgtgaaactagcaatttattaggcttttaatgatatctggaccaaaggctgagggagctgtgctgtgtgtatgttgctttgtgctttgttttttagaagcttgtcgtttctttgccattttacttctttctttttttttgagacggagtcttgctctgtcccccaggctggagtgcagtggcgcagtttccgctcactgcaagctccgcctcctgggttcactccattctcctgcttcagcctcccaagtagctgggactacaggcgcccaccaccacgcccggctaattttctgtattttttagtagagatggggtttcaccatgttacccaggatggtcttgatcttctgaccttgtgatccgcccgcctcggcctcccaaagtgctgggattacaggcttgagccaccacgcctggcccattacccattacttgtttcttaatgttacattctctttccctctttttttttttttgttttttgagatggagtttcgctcttgttgcccaggctggagtgcaacggtgccattttggcccactgcaacctctgcctcccaggttcaaatgattctccagcctcagcctcccaagtagctaggattacaggcacctgccaccacgcccagctaatttttgtatttttagtagagatggggctttgccatgttggccaggctggtcttgaactgctgacctcaggtgatctgtctgcctcagcctcccaaagtgctgggattacaggtgtgagccactgcacccagtccttaatgctactttataggtgaaaattgtgaaataacttaaatttcattttaattaaagttaatttttgggaaattaacgaaaggttgacattttattcttttgaatattgcagttgttatttgggtttaaattggggggcttaggaaggaaagaagcctgatggttgtttctgaattttctgaaaattatgtttgatatgctgtatatgaaatccagcttggagagaatatgtccattgttaaggaaaaattaatgaagatttgatctagataaggcattccaatcatttggaagtggtttgagtatctttttttctttttttaatttgagacagagtcttgctctgtggagtgtagtggtgcaatcttggctcactgcatcctccacctcccgggttcaatcaagcaattctcctgcttcagcctcccgagtagctgggattacaggtatgggctaccatccccagctaatttttttttttggatggaatcttgctcccgtcgggcaggctggagtgcagtggtgtgatctcagctcactgcaacctccacctcccagtttcaagcgattaagtgattctccttcctcagcctcccgagtagctgggattacaggcgtgtgccaccacgtcgccaccacgtctggctaatttttgtatttttagtagagacagggtttcgccatgttggccaggctggtcatgaactcctgacctcaggtgatccacctgcttggcctcccaaagtgctaggattacaggtgtgagccactgtgcctggcttaagttttgtatttttagtagagacggtgttccatcatgttggtcaggctggtgtcaaactcctgaccatgcgatccgcctgcctcggcctcccaaagtgctgagattacaggcgagagccaccgtgcccggcctgtttgagtatcttttaaaaccagtaaggacaaactagaggtgtcagctctcttcatgggctttggagaaacaagacaaaaaggaaagagatgtttcgccgggcgcggtggctcactcctgtaatcccagcactttgggaggctgaggacagcggatcacccgaggtcaggagtcaagaccagagccattgcactccagcctgggcaacaagagcacaactttatctcaaaaaaaaaaaaaccaaaaaagaaacaggaaagagatgttttgattttttaagtctagagtgttctgttcttactctacagcacttagcagtagtccatctatcctccttgtttgttctttacaacaaaaccccattggttctctcttaccaagtttgctttattcttggtttatcctttgtaagatgtgaaagggatatgaagagcaaataggaagtgttactcttgctgcttgagagaaagctgttttacaatttgttggcaaacaatttgtaaaagtacaacaaaagtgtgcatttttggcttcttatttatgttttatcattgctatatctcataatttgtgatttttaaaataactttttatttgaaaagcactacagggtcacgtcatgtttttaaaaaataaattaagaaggtaaacacccgtacttctactttacctctagtcctagtctatggtggtaatcagtgttaacagtttagtttgtgttcttacccttccaggggttttttttctctatgtatacagatatatgcatttttaaaaacatagttaacacttaaaaacaatatgggatcgtattaggaatacaatctgtattccttcccaacagtatatacagtttttttccatttcactatgtatctatttataaattttttatttctaataatttctcttgaataggtgagacatcatatagtataaaattcagtagaaaatcagtttttcagaggtacaaaattggctgactttgcacagactcctttcatttcacaggtagggatgcacagccacctcttccaccgacgagaggaaaggatatgtgtgcctgtgggctcttcaactctgttgattagttatgatttattttctggtcagtttgagaggaaacagtgataaaatactgggaacagggaagaagcataagattattattgtttttttttttttttttgagacagagtcttgctcagttgcccaggctggagtgcagtggtgcgatctttgctcactgcaagctccgcctcccgggtccatgccattctcctgcctcagcctcccgagtagctgggactacaggcgcccgccaccacgccctgctaattttttttttgtatttttagtagagacagggtttcaccatgttagccaggatggtctcgatttcctgacctcgtgatccacccgcctcggcctcccaaagtgctgggattataggcgtgaaccaccgcgcccagctttaattttttttttttttttttttttgagacagagtcttgctctgtcgcccaggctgaagtgcagtggcgcgatctcggcttgctgcaagctccgcctcccaggttcacgccattctcctgcctcagcctcctgagtagctgggattacaggcacccgtcaccatgcccagctaattacgggacctcgctctgtcgcccgggctggagtgcagtggcacagtctcgctcactgcaatctggcaagtgattctcttgcctcagcctccagagtagctgggactacaggtgtgcgccgctacgcccagctaatttttgtatttttagtagagatagggtttcgccatgttggttggccaggatggtctcgatctcttgacctcgtgatccgcccttctcggcctcccaaagtgctgggattaccggtgtgagccatcgcacctggccttcctactttattaagatacctaagggatttctgtgattgttaggattcaaatttctgtgagcataagaatcaagctgtgtgcataataattgcatgggatttcacagctgggccccattcccagggattttgtattatctacctccaagtgattttgatgctggtgatccttggaccagacttggtgaagctcaatgcttagctaggaaagccccaaaaatttgctttattggattgtgtaatttgactacatccattgtttcttttttcaaatgtagagttatatgccacaaaaatattttccgtagcagtaggcatcctaattaatctcgatgtttgtttatagccccattgatggggctataaacttggcagcaaattgttttcccactaatttggcattttccataaatgtttgtttatagccccattgatggggctataaacttggcagcaaattgttttcccactaatttggcattttccataaaaaacacgtatctgttgttagctgcctagacgttagctggacatggtttaggttacttttctcttaaaaagtaaattttaattcaagttcctttaagccagcagtctcaacctggggcagtttttccctccaggggacattcagcagtgtctagagacatttttggttgtcatgctgaggaagagagtgtatagtgggtagaatccagggatgctgttaagcatggaacagccccttacaacaaaaaattatgtagcctaaaatggcagtgttgccaagattgagaaattatgctttaaatgtgtttttatatatggccattttgtgtttactctggagataacatgcttttcctcatataacatgcttgataaacattttggtaacacaggaattgtaaatgctggtgatgtcagtaaatagttaagaaatttagggctgtgcgcggtggctcacgcctgtaatcccagcactttgggaggccgaggcgggtggatcccgaggtcaggagatcgagaccatcctggctaacatggtgaaaccccgtctctactaaaaatacaaaaaaatgagccgggtgtggtggcaggcacctgtagtcccagctactcaatttagaaagcagatttgtttcctttctatacctgtgtaatttgaggtttagtttactgtcacatcgtttataaacataaggaagatcgttgctcatctgatagcattccgaaccttgagtcatctgtaatgcctatggcctccagaaaagcttctctaatactgtacttagagatgtgtaaaatatgtaggaacattttcccaccttcgattgttagtttacctttcagcttcagtaatttacctttcagctattactttagtaacatcttcaacattgtttttcaaactgcaaggtgtgacccagtagtgggtcgttaaattagtaggtgacagagcatttttgaagaattaaatacaatagaacatagcagagtgggctcacgcctgtaatcccagcactttgggaggcgaggctggcaggtcacaaggtcggcaggtcacaaggtcagaagatcgagaccttcctggctctaacatggtgaaaccccgtctctactaatagtacaaaaaattagcggggtgtggtggcatgcgtctctagtcccagctactcaggaggctgaggcacgagaatcacttgaatccgggagctggaggttgcagtgagccgagattgcaccactgcactccagcctcagcaacagagcaagactatttcaaaaaaaaaaaaaaaaaaaaagaaagaaagaaaaaaagaaaatagagtgtatcacataattagagtagcaagtattgatttgtgaaacctattttaatcatagatctatgtatgtatgtgctggattgtgatgtaaagacatttcttgctgtggttacactgaaaaaaatgaaaagtcactgatttccaataacttacagaagcagtatgaactacatattctgtcgttcttgaaacaagctgagattttattgactttgggaagcagtagaattattttagttttttaattaacagtttttggctttgtactgtcaagaggtaattttagaaagcattctaaaaatgtaagtactggatttggcaacattcttgaactgtaattctgtttcgttaaacatcactatttacatgtgcaacagcgtgtctgtaacaatgtcccagtaatgaaattctttcttctatttaaggcatgtctgtttgataaaagtcaaacaaaattgggtatatgtcagtgtcttatgatactgcttaattaaacattaatttgactcttagctaatcaggaaatgtttgcctcacagtcttacagagctttccaccttctaaaaaagctaacgtttcagaatagattcaggattcaaccttctttctgtctttttttttttttgtttgagacagagtcttgctctgttgcccaggctggagtacagtggcgctatctcggctcactgcaacctccgcctcctgggttcaagcaattctcctgcctcagcctcccgagtagccggggttacaggcgtgcgccaccatgcccagctaatttttttgtatttttagtagagacagggtttcaccatgctgggtggccaggcgggtctcaaacttctgaccttgagatctgcccaccgtggcttcccaaaatgctgggattataggcgtgagccaccgcacctagcctagattcaggctgcttctttttttttttttttttgagacagagtcttgctcttgttgcccaggctggagtgccatggcatgatctcagtgcaccacaatctctgcttcccaggtttaagcgattctcctgcctcagcctcccaagtagatgggatcacaggcatgagccaccatgcctggctaattttgtattttttgtacagacggggtttctccatgttggtcaggccagtctcgaactccctacctcaggtgatctgcctgcctcggcctctcaaagtgctgggattacaggtgtgagccactgcgcccagcagattcaagctttttaaatggaattttgagctgatttagttgagacttacgtgcttagttgataaattttaattttatactaaaatattttacattaattcaagttaatttatttcagattgaatttagtggaagcttttgtagaagatgcagaattgaggcagactttacaagaagatttacttcgtcgattcccagatcttaaccgacttgccaagaagtttcaaagacaagcagcaaacttacaagattgttaccgactctatcagggtataaatcaactacctaatgttatacaggctctggaaaaacatgaaggtaacaagtgattttgtttttttgttttccttcaactcatacaatatatacttggcaatgtgctgtcctcataaagttggtggtggtgactcactcttaggacacattcagatttcttttttttttttttttgagaaggagtcttgctccgttgccaaggctagagtgcagtggcacaatctcagctcactgcaacctctgcctcctgggttcaagcgattctcctgcctcagcttcctgagtggctgggattacaggcatgtgccaccatgcccggctaatttttgtacttttagttttaccatgttggccaggttcgtctggaactcccaatctcaggtgacccacctgcctcggcctcccaaagtgctgggagtacaggcgtgagccacagagcctggccatgttcagacttctaataacaggtttgtattgactcttagcctcatggcagaagccaagagacatgagacagcttagaaatttttgctttttggaaatgaatgttagagttactggtttgtgattaaggcctattgcactgacagaggcagtgaaaaagggtttgattgccaaggaagattcacagggcctagaatggcagtggttatgcatctacagtttattacaggagaaggatacaatccagtagcaggattatggtaaggatatgcatcacagtcaaaggctgtcatagcaagtcatccagagagttcgggtgcaagttccagttttcctttgttgtgtaaagtctgtggtggggtgcattttctctctcagagcaggatgtgtgcacaggacaccttggaacctaggagcccaaaatagagtcttcactggactttttaatatttttcttgtcaagcggacatgttcctgttctctaactagcctcttcagtggaggtcagaggaagagcctcattgagaccaagtgcaactcatcaatcacatgaaacaatgctgataaataaaccacctaaatatcccctgacccacaaatacaaaacaacaccattcaatcagtatttttcatgccttgatcaggggtcattgccatgcaggaactttaacaaaacagtacaggctaataatagaattgttggaattaactcacacagcacacctatgagagagagttaagatagagggtcttggtggtctctaacagttgaattcaaagtgaagttaccagagtaaagtgagcaaagacacatattagtacaatattggtagataaaatcacgttgctctaataagcatagttttaaactttaaccatgtttctccagtaattttagtaattatattgttgttatgtctaatacataaagcattttttacttttttaaaaaatttttaggcaatgtggggtccaaagtaattaaaaaaaaatttttttaacataaagcatcttaaaattttacttaatcatgatcacttagaaccattaaaacatacgttttgatattatggggaagcttcgttgttcctttgtagacagacttaaagaaatacaactttatgatgacaagatataagataattatagatttaaattttatagaaaccttttcccttatctagtgcaagaggtagctaagtgcttattttctcaaagtactgtgttataaaaagtattcctagtgtagtcaaagcttctctttagactgataaaacttagagcacctgcatttacttccaacaaagcagaattaaagaaaatgagacttggccgggtacgtttgtaatcccagcactttgggaggccgaggcaggtggatcatgaggttaggagatcaagaccattctggctaacatggtgaaaccctgtctctaccaaaaatacaaaaaattagctgacatggtggtgcgcacctgtagtcccagcttctcaggtggctgaggcaggagaatcgcttgaacccaggaggtggaggttgcagtgagctgagatcacaccactgcgctccagcttgggcaacaaaaaaaaaaaaaaaaaaaagaaaaagaaaatgagtctttactggctgggcacagtggctcacacctgtaatcccagcactttgggagaccgagacgggcagatcacctgaggtcgggcattcgagaccagcctgaccaatatggagaaaccccatttgtactaaaaatacaaaattagcggggcgtggtggcgcatgcctgtaatcccagctattcgggaggctgaggcaggagaattgcctgaacccgggaggcggaggttgcggtgagcagagatcgtgccgttgcactccattctgggcaacaagagcgaaactctccatctcaaaaaaaagaaaatgagtctatactttgctgttttcatactctcttagtgtggtgtaggcagccatgtatcccccttgtgcctctatttctccattctgtgaatgagtgtcttccactgctgtgcttttctgattccgtaacctttgtttgtttgtttgtttgtttgtttgtttgttttttattgatcattcttgggtgtttctcgcagagggggatttggcagggtcacaggacaatagtggagggaaggtcagcagataaacaagtgaacaaaggtctctggttttcctaggcagaggaccctgcggccttccgcagtgtttgtgtccctgggtacttgagattagggagtggtgatgactcttaatgagcgtgctgccttcaagcatctgtttaacaaagcacatcttgcaccacccttaatccgttcaaccctgagtggacacagcacatgtttcagagagcacagggttgggggtaaggtcacagatcaacaggatcccaaggcagaataatttttcgtagtacagaacaaaatgaaaagtctcccacgtctacctctttctacacagacacggcaaccatccgatttctcaatcttttccccacctttcccccctttctattccacaaaaccgccattgtcatcatggcccgttctcaatgagctgttgagtacacctcccagacggggtggtggccgggcagaggggctcctcactacccagtaggggcggccgggcagaggcgcccctcacctcccggacggggcggctggccgggcggggggctgaccccccccccccgcctccctcccggacggggcggctggccaggcggggggctgacctccccgcctccctcccggatggggtggctggccgggttgggggctgaccccccgcacctccctcccggatggggcggctggctgggcagaggggctcctctcttcccagtaggggcagccgggcagaggcgcccctcacctcccggatggggcggctggccgggcggggggctgacccccccacctgcctccaggacggggcggctggccgggcagagcggctcctcacttcccagtaggggcggccaggcagaggcgcccctcacctcccggacggggcggctggccgggcagaggggctcctctcttcccagtaggggcggccgggcagaggcgcccctcacctcccggatggggcggctggccgggcggggggctgacccccccacatccttcccggacggggcggctggccgggcagagggtctcctcacttcccagtaggggcggccgggcagaggcgcccctcacctcccggacggggcagctggccgggcggggtgctgacccccccacctctctcctggctgggcggctggctgggcggggggatgacccccccatctccctcctggatggggcggctggccgggcggggggctaacccccccacctcccttccggacggggtggctgccgggcgcagacgctcctcacttcccagacggagtggctgccgggcggaggggctcctcacttctcagacggtgtggctgccgggcggaggggctcctcacttctcagacggggcggttgccaggcagagggtctcctcacttctcagacggggcggccgggcagagacgctcctcacatcccagacggggcggcagggcagaggcgctccccacatctcagacgatgggcggcctggtagagacgctcctcacttcctagatgggatggcggccgggcagagacgctcctcactttccagactgggcagccaggcagagaggctcctcacatcccggacgatgggcggccaggcagagatgctcctcacttcccagacggggtggcggccgggcagaggctgcaatctcggcactttgcggggccaaggcaggcagctgggaggtggaggttgtagcgaactgagatcacgccactgcaccccagcctgggcaccattgagcactgagtgaacgcgactccgtctgacatcccggcacctcgggaggccgaggctggcggatcactcgcggttaggagctggagaccagcccggccaacacagcgaaaccccgtctccaccaaaaaaataccaaaaccagtcaggcgtggcggcgcgcacctgcaatcgcaggcactcggcaggctgaggcaggagaatcaggcagggaggttgtagtgagccgagatggcagcagtacagtccagctttggctcggcatcagggggagaccatggaaagagagggagagggagaccgtggggagagggagaggagggagagggagagggaaccttttgttttattccagtaggaccagctagaaacagaaggtgattgaccagtattagggatggaatcagggtacaattatggagacaggctatctaaacaattcactctcaccatttaaatcagctgtttgatcattttttttccatatatctttaccatcgcatagtaaataatatcctttttattttcaagagggagtattggccttaagttaggaactctcttaatttttttcccccatcatcccacccgcacttcttactccttacttcctacttgcttttattctttactggctctttaccactgcgtatttttaggtgcatacatctattttttaaaaaagcacccttgttcctgggtcctcttccagtaccatctattaatatatctctctccctctttccactcccagctgggtttctgaaagcgtgcacttcccatcttccattcattcatctggtttccagccctgaccacagtactgaaatggcatttgctaggtgacctttatttttttttaaatccagtgaatgcggtatagtccccccgcttttttctttctttttttttttttgttttttgttttttgtttttttgagacagagttttgcccttgttgcccaggctggagtacaatggcgtgatatcggctcacggcaacctatgcctccccaggttcaagcgattctcctgcttcagcctcccaagtagctggattacaggcacctgccaccacagctggctaattttgtatttttagtagagatgggttttctcgatgttggtcaggctggtttcgaactcccgacctgaggtgatccacacacctctgcctcccaaagtgctgggattacaggtgtgagccactgcgcccagccttggtatagtctttaacgaaagttcactgatcttgaaaattttgatcttgaaactcttttttttttttttttttttttttttgagatggagtcttgctctgtcacccaggctggagtgcagtggcacaatctcagctcactgcaacctccacctcccaggttcaagcgattctcctgcctcagtctcccgagtagctaggattacaggtgcccaccaccatgcctggctaattttttgtatttttttagtagagatggggtttcactacattggccaggatggtcttgaactcctgacctcatgatccacccacctcggacctcccaaagtgctaggattacaggcgtgagccaccatgcccagccttgaaactctcctaaggttatgttaaacatttttgtattcttggttttctttttgttccatgggttatttctctttatccttctttttagctttcttaagtgttcctttaccttatcaaattctatttttggctcccatttcacttaataagaggaaaagctgggatttttttttttcttttgtggagacagagtctcactttgttgcccaggctggagtgcagtggtgcgatctcagctcactccaacctccgccttctgggttcaagcgattcttgtgcctcagcctcctgtgtagctgggattgcaggcatgtgccaccacgcctggctaatttttgtatttttagtagagatgggggtttcaccatgttggccaggctggtctcgaactcttgtcttccaagtgatctgcctgcctgggcctcccaaagtgctgggataaatttgagccattgtgctcgtctaagctgggattctttgaatgagttcttagaggcttcctgaaactttgtgcaacattttgtgtatgtgtatattttctggggaaaggatttgtaactttctattttttgagagggagtctctgtggctcagggtggagtgcagtggtgtgatctcggctcactgtaacttctgcctcctggttcaagtgattctcctgcctcaggctcccaagtacctggaattacaggcatgtgctaccacacctggctaattttgtatttttagtagagacagggtttcattatgttggccaggctgggaatttgtaactttcatcagatatcccaagggatatatgtctttcctggtagagagggaagaaacaaaaaacgtgtgtaaataccctcctctcccccagaaggtaagaagtactgctctgcacattccttgggtgatctttctcactccctgggataattaaggaagttagggattggggttgagggtaacttggcatccttccccaacctccctgtataggcacagtctaatatacttgatgacagtttgcaacaagtcaacaatttcctacttttctggtgttaggtttaagttatatagacctatggtgatcataacattatctaaatcagatgcttcacattataggtcttgcagctgatgtccagtttaggtgtttgaagtggcttagcctggaaaatgttacaggggaaaatctgctttccatgtgttatgctcagagctgtgttcttttcttttacacaatatgtttgacatttgttgaattttaggtgtaccctggtcattaggaactccctaaaggatctctgtgaggttttaaaaaaacaaaacaaaacaaaaaaacagtggcattttgcagaactcagtatagctctttaccatactgactgcaaggagaaagtaaaaagtgagactaattttgcaattagtctcccaagtttctttacaagaaaatagaccaaaggtactatgtttaaaagcaaaatcatggcttaaaagtttttctttttcttaatatattaatatattgctataaattgagtattgctctcttgctatcttgtgtttttttggtttttgattaactctaagcttaatgttattcctgacaaataaataaataaataaataaataaataaataaagtgaattcagagagacagtagagggcagcagccgtttagaaagtagattcacattgagtgattacggctcttttaaatctttctccactaagagatagctaatttccgaaaaggtatacttggcctcccatattccttatgtctcttaaaactaaaaaagctgggacaaaacttaaaataacagtattctacggttagggcaaatttctgatactgcttaaaacaatttaccgaggtatctttatttttttttgagacagggtttcactctgtcacccaggctggagtgctggagccttgacctcctgggctcagctcaagtgttcctctcacctcagtctgccaagtagctgggactacaggcatgcaccatcattcccaactaattttttaaaattttttgtagagatgggggtttcatcatgttgccaggctggtctcgaactcttgggctcaagcaatctgcccacctcgtcctcccgaagtacagggttataggcatgagccaccactcccagcctcagatttttttattgatgaattttattataacagctacaatactgagatgcataacccttccctttcctgatacccagttatcatctgtttctgtttaatacactccttaagtacctcacatttgctattcccctgccccccatggtctatgcatcttcttcattgaagtggtagtagtctttgttagctcatctggtcatgtcatcaattcagagcacattacctctttagttcagaacacattaattgcttcccataatcttcaggacacggccccatttcttcacgtggcttggccattgcttccctgttcagcttcccccacactccctcacctacaccttctgtctcagtatagtactgctagtctccagacatgccatgcctttttatgcttctatgcgtgttttcctgtctttaatgtccttgtccatgtgatgaacccctactcatttttccaagattgaactcaaatgtcaccttttctgtgagcttctctgctcttctcatgcagagtagaagtgtttatctccattgcccttgaccctaaataacagtacattagtataataatcacattttttacctgtttgtgtgctttccttctaaatggagaataagaatataaaagtgatttatttggcatttctgcaaagggagatgataaaaagaatctgcgttacttagcctttttaaaaaacccttagcctatgaaggctactatttaaggtttggttggattttgtatgttggaaatatgttctttaaatctcatcttcatcagtttataaaagcaatataagttctttgtagatcattatcatgccatccagatgtagtcattattgttttgatataggttgtttcagtctttaaaccaaattatacactgttccgctgtaactcttgttttgaaaacagatttgttccaatgtgggtggtatattagggaacaatttgagcataatgtaaattttgagtttgcttatgcacaaatccctaggcaacactaggtgaatgcagaaaaatgcatgcagctgaactcagcagtgtagatatatacaaaagatacacatacacacgctcttcaaatacctaccttattttcctgtatgtgttatgaaccatacccattcacatctggtattacaactttgccacccatttcagacagtattcctttgaccattctgcagtaactcagaagctgcagccctttagaagtctactccactgtggctcacgtctgtaatcccagcactttgggaggccgaggtgggtggatcatgaggtcaggagatcaagaccatcctggctaacacggtgaaaccccgtctctactaaaaaaaaatagaaaaacctagccgggcgtggtggtgggcatttgtggtcccagctactcgggaggccgaggcaggagaatggcgtgaaccggggaggcagagcttgcagtgagccaagattgcgccactgcactccagcctgggcgacagagcgagagtccgtctcaaaaaaaaaaaaaaagaaaaaaagaaggccactccacaagcaaaccgcagatgttttgcaaggtgacttatttattgtaatagttgtgtatttcttaaccatttcacatgtataaaactgtgctactacttttatgaggttcctgtctttattttttttaacatgtcgctggtgaaggttctgagagttgtggcttgaactccagttttctcataagcacggttttttgttgtttttttttgaaatggtctcgctgtgttccccaggctggagtgcagtggtgtggtctcggctttctgcagccttggcctcccagcttaagctatcctcccacctcaagctatcctcccacctcagcctcccaaatagctgggactgcaggcgtgagcctttgcccacctaatttttatacttttgtagagacagtttttccatgttgccaggctgctttggaactccttagctcaagcaatcagcccgccttcacctcccaaagtgctgggattacaggtgtgtcctaccacacccagacggctctggtatttactgcatagtgttctgatttttaggaatacatacgttgcattatatagcagaactggctgtattcaaaagtctaatagaaaatattgatagggtgataatgtatatagtactaattgtcagttgccataatttaactaatattgttttactttttactttttttttttttgagatggggccttgctatattacctaggctggtcttgaactcctgagctcaaggaatcctcttgcctcaacctcctgaggatgtttgacattttttgacttttttttttttttttttgagacggagtcttgctctgtctcccaggctggagtgcagtggcatgatctcggctcactgcagcctccacctcccgggttcaagggttcaagcacttctgcctcagcctcctgagtagctaggattacaggtgtgcaccaccaccacggctgatttttgtatttttaatagagatggggtttcaccatgttggtcaggctggtcttgaactcctgacctcgtgatcctcctgtgtcagcctcccaaagtgctgtgggtacaggcgtgagcctccatgccggccggctttttggcaatttaaatagttacagttacctattataattgatatttagctaacatctatttttattttaatattccaggaaattattatgcagaaactttaaaggtctgtgtacttctctggtgttttgattttttttttttctttttctgtgagtaattttctaaaactggtttctaggccaggctatttatgtcttgctttttattttttttggcgatggagtctcgctttgttgcccaggctggagtgcagtggcgctatctcatcttgctgcaacctctgcctcctgggttcaagcagttatcctgcctcagcctcccgagtagctgggactacaggcacatgccaccacgcctggctagttttttgtatttttagtagaggtggagtttcaccgtgttgcccaggctggtctggaacttctgagctcaggcagtctgcctgccttggcctcccaaagtgctaggattacaggtgtaagccactgctcccagccttattattttatttttatggattcggggtatatgtgcaggtttgtcccatggatatattgtgtaatggtgagttttggacttctgttgtgcccatgaacattgtacccaataggtggtaatttttcaattctcatccctctctctgcctctgcccttttggagttcccagtatctgttaattctctctgtatgtccatgtgtacccattgtttagctcctctattttttattttattttattttatttttgagacaagagtcttgctgtatcacccaggctggagtgcagtggtgcaatctcagttcactgcaaccttggtctctgggttcagatgattctcgtgccttagcctcccgagtagctggaattacaggtccgtgccacgatgcccggctaatttttgtattttcagtagaggtggagtttcgccatgttggccaggctggcctcaaactcttggcctgaagcaatccgcctgccttggcctcccaaagtgctgggattacggtgtgagccactgctcctgaccccatattttttcttttaattataaaggtaataatgtaaaaagaagtcaactcccagtttaactctagcagagtaaccagtgttaatttttttttttttttttttgagacggagtcttgctctatttcccaggctggagtgcagtgatgccatcttggctcactgcaacttctgcctcctgggttcaagccattctcgtgcctcagcttcctgagtagctgagattataggcgcccagtgccacgcctggctaatttgtgtatttttagtagagatggggtttcaccatgttggctaggctggtgttgaactcctgacctcgtgatccacccgcctcgatgctgggattacaggcgtgagccactgagcctggccaatccattcctttttatggctgagtagtattccattgtgtgtgtgtgtatatatacatatatatacacacatatacatatatatacacgtatatatgtatgtatgcgtatatatgtatgtgtgtgtgtatatatacacatatacatatatatacacctatatatgtggtatgtgtatatatatgtggtatgtatatatatgtggtatatatatgtggtatgtgtatatatatatgtggtatgtgtatatatatatgtatatatgtgtgtatatatgtggtatgtatatatatatgtatatatgtggtatgtatatatgtatatatgtgtgtctgcatatatgtatatgtgtgtatatatacacgtatatgtgtatatatatacgtatatatgtgtatatatacatatatacgtatatatatacacacacacatatatatacacatatgcaggcacacatatatatacatatatatatatacataccacagtttctttatccacttgttgattcatgggcatttgggttggttccacgtttttgcaattgtgaattgtgctgctataaacatccgtgtgcaagtatcttttttgtataatgatatcttttcccctgggtagatacccagtagtgggattgctggatcaactggtagttctacttttaaggaatctccacactgttttccttagtggttatactggtttacattcccaccagaagtgtagaagtgttccctgttcactgcatccacaccaacatctatttttgattttttgattatggccattcttgcaggagtaaggtggtatcgcattgtggttttgatttacatttccctgatcattagtgatgttgagcatttttttatgtttgtttgccatttgtatatcttcttgagaattgtctattcatgtccttagcccattttttgataggattgtttgttttttttcttgctagtttgtttgagcttgttgtagattctggttattagtcctttgtcagatttatagattgtgaagatttttttcccactctgtgggttgtctgtttttgtctgtttccttctgctgactgttccttttgccatgcaaaagctctttttttttgagacagaatctcgctctgtcggccaggctggtaacaaagacacaggtactggtaataactgccatggcttattgcctacattaatgatgaaagcaaatgctaaatttcagctagaggctagagaaaataagcctggaattttcttttatgtttatatactgctatgaataccaggagtccttgggttaagactgtagggctttctaaagcctgtgatcactagtggagaatgtagctttacaaagtctagttggaaattggcaactgggggttagtacaagttacaaggaagggatggaatttaagatgctagtgaaagcttggaggataagggagcaggtgaactcataaggaagtttatgaactgagaagggctgcagcaaagtgggctcatgtgcttgaggagccagaggacatgttgagggtgacataggttctgaagttcgtacagatacttatgcagtatggattcttggaaaaccttctttagtcatgtgatagaaaaataacagcttatggaaaaaacagggttgaggcagacctgaaaatacatgaaattttaaaaaccgcttctaacagaagcataacagactgtaataaaaactgtggccttcctggcatttgcacccaaacaacagcattagccaactctttgaagccttagatctgtggctcttgttttctcctttgaggtgtaggtccttgagggcatttgcttctaatagaggctagtttcatcagaattaaaaatctgaaccatggtatgaaattcaattcttttttttttttcttttttgaaaacactggcaaatgttttgtatccttgagctttcccacatatcttaacatagtgagtggaaagtacagtggctgttaagccaactactctgaggtcttcactgctaaggcttactcttaattgtgtgagagcttaaccttgatccctttaaaacattaatgggctagaaaaaaaaccattcataaaccagtgccacctctgaattttgctaccacaattcccttatttaccaatagtgcatgagctaatttggaataaagaactaggcattgtagcacaacagacattatgtgggcaaagtgttgtttatattctgtctaaatagtgcttcacatgtatgtactattttctaaatatgtatagatgcttttgtgattaataataaaacatgaattcttaaaacaattttgctgacttcatagtagcttttcaccgttttttcagtagctgctaaaatttctggagaagtttgggaactattgttttggagtgaaatgcagtgtgttagatatcacttgcagaattcttctaagggtatttattggcgattagaaaaaaaatccttgtgttataccagtagtaatacaaagtaattgttcagcttctgttaagtgtaaaggactatacaagtattgtgtatagttatctcatttattattttctgggtagctattgttattattacttcgtacaaaaagggaaaaggaggctcaaagtatcatgctccagataacagagccagtaggtagcagagctgggattgctacccaggtctctagtcctgctttttcacactatatactcattgcttcacttactccttcatacatgattccccagcatgtactcttttttttttttttttttttttgtttgagatagaatctcgctctctgttgcccaggctggcaggcagtagtgtgatcttgggctaactgcaacctccatctcctgcattcaagcagttctcctgcttcaacctcctgagtagctgagattataagcctatgctaccacgcctggctaatttttgtatttttagcagagatgaggtttcgccttgttggccaggctggtctcaaactcctgaactcaagtgatctgcccacctcagcctccgaaagtgctgggattataggcatgagccatcatgtccggcctccccatcatgtacccttaaataccatcaagcacagttccattgtgtaaaaacttggcttgatttaacctgttaattggaacactgtcattaatggaaattaggaatatgaggtaagctagaggttttattttaatgactttgggttattaaatctataagaaatgaaattcatttagtcataattaatgtcatgtttctgcatctatattacttgttgggtttacagacgaggtagtgtattattagtgggaagctttgagtgctacatcatctccctttctataaaataaattgagtacgaaacaatttgaattaaaacacctgagtaaatagtaactttggagacctgctgtactatttgtaccttttggatcaaatgatgcttgtttatctcagtcaaaattttatgatttgtattctgtaaaatgagatctttttatttgtttgttttactactttcttttaggaaaacaccagaaattattgttggcagtttttgtgactcctcttactgatcttcgttctgacttctccaagtttcaggaaatgatagaaacaactttagatatggatcaggtatgcaatatactttttaatttaagcagtagttatttttaaaaagcaaaggccactttaagaaagtttgtagatttttctttttagtatctaattgtagcacctttgtggacagtggatgtaatattaagtgacagatgggaaaaggatttttaaaaaaatagcaactgtttcagtggatgaaataaagattattagcagagaaaatgaatattgggcataactgtcctggtgaaagacaatctcataaatgaacaatttcataatttcgtaaatgcaactgcattttattttcaaagagaaggaaaattatagtcactggaaacggaaagagaagttagaggtaaacataggacacacaagaaaactttcattttgtttattttcttgtttttcttttgagacagggtttccctctgttacccaggcttaagtgcagtgacactatcatagttcactaacccctcaaattcctgggttcaagtaatcctcctgccttagccttagtaggtgtaaatacaggtgtgtaccaccatgcctggcgaattttaaaaaaacttttttatagagatgagctctcgccgtgttgcccaagctggtcctaaaacgctggcctcaagctatcctccggcctcagtcttagcctcccaaaatgctggggtttcagtagaagccaccatgccgggccacttctgtttcttttccatgtagagttctttgcaggaggaggttagaataggtgtgcatctcctaaatagttgtcgaatataactaaaaagttaaccaggactctaaatactatttacttctaaaatttgttaattgggaacatttagggtttaactgatctatatcttatgtctttaacaattttgaatgataattatatgtaaagtaagaacagtttgtgaaatagttgaaaatatccttacatgaaagtgaattttaaagcacagtttatgtaatgttaatgttttgttttgtatctgttaaaaatttgtttatatgaacaagtttacaggtttactgtggtgagcccgttgaatatagtgggttttttttgtttgttttgtttttgtttttgagatgaagtctcactcttgtcccgaggctgatgtgcaatggcgcgatcttggctcactgcaacctctgcctcctgggttcaagcgattctcctgccttagcctcccgagtagctgggattataggcacctgtcaccaaacccggctaagttttgtatttttggtagagatgggatctcagcatgttggccaggctggactcaggtgatccgtctgcctcggcctcccaagtgctgggattacaggtgtgagccaccatgccgagcctgaatatagtgtttttaagttgcaggactttaaaaataatattttgaaatttttctaagttaaattccctgttaaaatggtcatgcaggaatatacgcttgcattattcatattagggtaactgtttggtttgctagttgttagattctttgcattcctttttttttttttttttttttttttttttgagacggagtttcactctttttgacaaggctggagtgcaatggcgctatctcggctcacctcaacctccgcctcctgggttcaagcgattctcctgcctcagcctcccaagtagctggaattacaggaatacgccaccaagcccggctaattttgtatttttagtagagatggggtttctccatgttggtcaggctggtctcaaactcccagtctcaggtgatcagcccacctcggcctcccaaagtgctgggattacaggagtaatcccccacccttttaaaaaaatgagacagagttttattctgtcacccagggtggagtgcagtggtgcgatcatggttcaccgcagccttgaatctgggctcaagtgatcctcccacttcagcctcccaagtagttggaaccatagatgtgcatcaccacacctggctgatttttaaattatttgtagagatgaggtcttgcttgttgtctaggctggtcttaaacttctgggcttcagcagtcctcctgcctcagcctcccagagtgctgagatgatagacatgggccactgcccctggccgcatttttcttttcttttcctttctttttttttttttttttttgaaacggagttttgccattgtcgcccaggctggagtgcagtggcacgatctctgctcactgcaacctctgcctcccgagttcaagccattcttctgcctcagccttccagttatctgggattacagtcatgtgccaccacgcccagctaatttttgtatttttagtagaaacagggtttctctatgttggtcaggcttgtcccaaactcctgacctcagatgatccacctgcgtctgcctcccaaagtgctgggattataggcgtgagccaccatgcccggccctaactgcatttttcttagtatttgtggtttgagttaatacttgccctatgtgatgttgatttattattactggatcattaagtgaggtttaaagaagctaaatgccatttgctctatgccctctggattttaaaagtgcatgggtgtgcacgtgtgtaggtataaatgtttccatattctagtatattctgtgtcagtgatagagcagtcttagagctgtcttttccatttacttgtaggttaagaagccaaaaaaagttgtgtcatcatcccgtttaggaaaacttacattttggctattgtttcctctagtgctgctattagtggaatgattttaggtgttcaactttcagatcaatgggagacagaaatattgttctgagacatctggaagccgaatgtgttttattcctgcctgtctgaggatgtggtcttgcctttgatagggcaaagttatttgtaaacattgctttaaataaaaacatgtaaaggtgtttttgatggttaacaaaaactatgagtataatagagcctagtccctattacggactggtattgatctggtgtgggaagagtattgagcttttcagtgtcacctacctgtattcccttgaagggacccagagcccaggcaaagctctgctgaggtcgggcgtggtggttcacgcctgtaatcctagcattttaggagaccaaggcgggtggatcacctgaggtcaggagttcaagaccagcctagccaacatggtgaaaccctgtctctactaaaaatacaaaaattagctgggtgtggtggtgcatgcctgtaatcccagctatctgggaggctgaggcaagagaattgcttgaacccaggagacggaggttgcaatgagccgagatcatgccactgcactctaggtgggtccctgagtgagactccatctcaaaaaaaaaaacaaacaaaaaaaaaaaaaaaaaaaaacctctgctgaaatgctacagttaattttgccatttgtggtcagcattcttcttctaaattgctataatcttgccttcatattatgtgtctcaaatttaagcaggtatcagaatgtccacgggaacaaattgccatggctctaagcccagaatcagattcttcagatctggagtagggctggggaatttgcatttctaacacacaagtttgttgatgctgtttgtctggggtccacgcttgcctaacttctgatgtgatttatttctgccagtttctttttttgttgttgttttatttttttgagatggagtctcgctctgtcactcaggctagggtgcagtggcatgatcttggctcactgcaacccctgcctcctgggttcaagcgattctcctgcctcagcctcctgagtagctggggttataggcacactgcaccacacccagctaatttttgtatttttcgtagagacagggtttcaccatgttggccaggctggtcttgaactcctgacctcaggtgatccattggcctcggcctcccaaagtgctcggattacaggtgtgagccacccaccatgcctggcccttcctaccaatttctatcctccctgaaatgctgcacacttaggcagtcactggacaatatctgccccaaaattggtttgtataattgagaatatttaagaggttgttaaaatttgaaccactttctattcttctattaagtgtacacatctattaaagatccccttgtagctctttttatctgggccatcacatttctgcccagcagatgcagaggccctgtcctctcttccacctccccactacctctccttccctacttttggactgtaaaagctgtctttctgcagttaattgttttattctttgtaggttctactcgttgataatgttatctactgctataataattacagacggcaacaggatgatcaaatcttggatattttaaatttacattatgccttttttattttatttttttaaagtctctgcttgacagcaaataagcctaacgttccctaacaaatgatgatgtcccattaatgatttgatgacttcctgtttgtagtttttatttagagtgcttgtgggtagtttttcataacgacatttaaaaatcaggatataaataattttttaagttttttttttaggcggggcacagtggctcacacctgtaattccagcattttgggaggctgaggtgggcagatcttgtgaggtcaggagttcaacaccagcctggccaacagggcgacaccccatttctactaaaaatacaaaaattaggccgggtgcggtggctcacacctgtaatcccagcactttgggaggccgaggcaggcagatcacaaggtcaggagatcgagaccatcctggctaacacggtgaaaccccatctctactaaaaatgcaaaaaattagccgggcatggtggcaggcgcctatagtcccagctactcggaaggctgaggcaggagaatggcttgaacccaggaggtggagcttgcagtgagccgagatggcgctgctgcactccaacctgggcgagagtgcgagactctgtctcaaaaaaataaacaaataaaaaataaaaaaattaaccaggcatggtggcgcatacctgtagtcccagctacttgggaggctgggacagtagaatcgcttgaactcgggaggtggaggttgcagtgagctgagatcacccactgaactccagcctgggcaacagagcaagactctgtctccaaaaaaaaaaaatgtatttttctttgaagcttttctacttttaaatgtaatgtatagtattataacaagtgaacaaaatgatacaaagaagtatggcgggaaaggtgtggtagagatgggaaaacatatttcctccagcctcttaggttcattggaggagcttgggaattcaactgacacacgacagatttacaggagaaaagttttatttcaagtacacatgagagcttcatagaaaagaagtgaagacctaaagaaacagactggagagttcatatgccattttaataaaggataatgtattagtctgttctcatgctgctaataaatacatacccaagactgggtaatttataaagaaaaagaggtttaatcgactcacaattgcacatggctggggaggccttacaatcatggcagaaggtaaaggaggagcaaaggcacatattacatggtgtcaggcaagagagtgtgtgcaggggaactgccctttataaaaccatcagatctcgagagacttattcaccatcacaagaacggcatgggaaaaacctgcccccgtgattcaattacctcccaccgggtccctcccatgacacatggggattatgggagctacaactcaagatgagatttgggtggggacacagccaagacatatcagataataaattgtggagaggcagtaagattgaagaaaagaggtttgagcttcgaggggtggtaaattgtgggaaggtaattatttggggcaaactaatggcacataaggattgttttagtaaggcttgttatgcatacccaaaacaagtgccatctccagtaatttaagagtctatggtgatcaagagtagttctcttcctgctagaagaggggtgggagagaacaccttcacaaagggaaatttatattctgccttcatgcagaaagggggcgagcagagagttcctacgtatactgtttcttcattatcttcctctcaaaagaatacttaggctaaagtggcatgatttggggtgacattctgatcctcttcagtgacaatccttgatatttttccttctttctctccaggtaaacagtgttaacatcctggtatgcttcccccaattccattatactaactctgtattgtgggttaaagattttttactttgatcagcagtatttgaaacatacctgttatactagatgtactctgactgtaaaatagtggtcagtgttacttctttaatgatgctgtgggattaaaggattttattataaatgctgggaagagcctggatttgaggaaggtaagcagtgcagttaggtggatgtagactagaagaggtcatttgttctcatttcattgttgcccctatgacatgcccgtttctttcttttttttctttttttttttgagacggcgtcttgctctgtcgcccaggctggagtgcagtggcgcaatctcacctcactgcaagctctgccccccgggttcatgccattcttctgcgtcagcctcccgagtagctggaactacaggcgcctgccaccatgcccagctaattttttgtattttcagtagacacggggtttcaccatgttggccagggtggtctcaatctcctcacctcatgatctgcccgcctcggcctcccaaagtgctgggattacaggcgtaagccactgcacccagcctacgtgcccatttcttaaagtagaaaatttagtagttgatgatgtcagggaagaaaagctttttctctgccttacgttaagtagttgggggcaaattaaattaataaaagacagattagtgagagaaaaggctgtaagaatttggactttatataccatcataatagaggaagtaaagggagatgaagggcacttaagggaaaacagatgacttgtaggaaagataaatgaacccttaagagaatagatgagaaatatgaaggttttgtgacaatgtctgtttaggtggttacttctcttcttgttatgagagtcagtcttctggttgctggaaactgctaggagatttataacaattgggctctttcgagaggctcttcttttaagcagataagggagttcacaaaaaagcctgttctcaaatgatttcagcacacacacacacacacttacgacacagttaagtactgtgccagtaagatgtgagttgtgcatttcttttttttctctgagtagactgtttgaggttatttatatcaggacttgttatgcaggtaactgaaaactcaacataatctaggttatgtagttaaaagtatggagagaaggtaggctttatttagagttgcttgatcctgtagatctcttctaccttttgtaattttaatttcaaccaaggatggttccctttttggccctaggaccagttagcagttggggcaccattccaagcaagagtcctgcagtttgtagtgatgggaccatttaaacagtgattgtgaccagggacatagaatgggatgattggcccgaggtaaccatggttgggtatggagtcagcttccctgtaggaagagatagacaaagtctgagcactcctgggaagggggaggaagggaataactgttgtgtaaatcatcagcagtgtctactaagataccatctgtaaccataggcttctatgttttataatataaggctgtcttttaaataaatcagattccctgttaaagatctgttctagattccctagggggttgacctcatatagtatcttctttttctttggttacaaacttttaaacttgtctgaggttataaggtgaattcaactgtccactgtcaatgtagatatttttaatggatttagggatttaaattacatgattcagaaccactttgaggaagtctagggaatatcagttgtttctgtataatttctgaaagcttcactgttttctaggtgtgcacttaattcatgtgatgaagggaacagtatttacatgagtggtttggttaatttttcccctcctaagcttagctttgtgtatcgtgcgtgcttccagtgtttttgtggctgctttacataagtcttttagaagtattttctatttttgaagtaaatgtggatcaaaaccaccccaagacaggattgaaaaaaagacagtttttcgcaagaaagtaaataattttatttagcttgggactttaaatgatatgtcttaaatgtaaacatttctatactgcattttggccatcttttgatactagttttcagatgcatattgttatttcatttattattggaaaagtagtaactttaaacaaatttttattgaaaatgctgacagaggccgagtgtagtagctcacacctgtaatgtcagcactttgggaggccgaggcgggcggatcacgagctcaggagatcaagaccatcctggctaacacggtgaaaccccgtctgtactaaaaatacaaaaaaattagccgggcatggtggcaggtccctgtagtcccagctactcaggaggctgaggcaggagcatggcatgaatctgggaggcggagcttgcagtgagccaagatcgcgctactgcactccagcctgggcaacagagcaagactccatctcaaaaaaaaaaaaaaaaagaaagaaaatgctgaccaaaaaaaatgaaatagttttaaagaagccacagttgtgtgatcctgatacaactatatcattattgtatgagtatatatgagttataaaaatagtatatgtaaatgcttcataatttttattattagaaatgaaaaagtataacaaggggggtattcatattctctccacttagaattaaccctcaacatgttgacatctttgtttatagtaatccttttttgttttttttgttttttattatactttaagttctagggtacatgtgtacaatgtgcaggtttgttacatatgtatacatgtgacatgttggtgtgttgcacccattaactcgtcatttacattaggtatatctcctgatgctatccctcccccctccctccacccctcaacaggtgtgtgatgttccccttcctgtgtccaagtgtcctcattgttcaattcccacctatgactgagaacatgcggtgtttggttttttgtccttgcgatagtttgctgagaatgatagtttccagcttcatccatttccctacaaaggacatgaactcatcattttttatggctgcatagtattccatggtgtatatgtgccacattttcttaatctagtctgtcattgttggacatttgggttgattccaagtctttgatgttgtgaatagtgccgcaataaacacacgtgtgcgtgagcctttatagcagcatgatttataatcctttgggtatatacccagtaatgggatggctgggtccaatggtatttctacttctagatccctgaggaatcgccacagtcttccacaatggttgaactagtttacagtcccaccaacagtgtaaaagtgttcctatttctccacatcgtctccagcacctgtcgtttcctgactttttaatgatcgccattctaactggtgtgagatggtatctcattgtggttttgatttgcatttctctgatggccagtgatgatgagctatagaaatcctttttagaaacaacagagccttgttgtaaaacaggtaaatgtacgtgaggacttcaaaaagtttgtggaaaaatggaattaaaagataaaatttaaaaacacattttaaatttatttcccaacataagctcctcaagttcaagacacttttataaatgatgatctcagctgtttagttcatccgtaaagaactgagggtactagaaattttaccatgtcaatgcagtctctttacattactaactaaagaaaaataggtgctctttaaagatcttttaagattaggaacaaaaagaagtcagaagaagccaaatcaaggtggatgcttaacgactttccatagaaacttacaaaattggccttgtttgatgagaagagcgtgcaggaacgttgtcatggtggaaaaggactttgatgatgctttccctggcatttttctgcaaaaacttgggataactttctcaaaacactctaataataagcagagcttatgttctttatccccccagaacatcagcaagcaaaatgcctgaacatcccaaaaaactgttgccatgacctttgcccttgactggtccacttttgcttcgactggaccacttccatttttggtagccattgctttgattgtgctttgtcttcaggatggcattggtaaagccatgttttggctcctgttacagttctttgaagaaatgcttcaggatcttgatcccttgtttaaatttctatggaaagctctgctcctgtctgcagttaatctgggtgcaacagttttgtcacccatcaagtgaaaagtttgttcagctttaatttttcagtcagaattgtgtaaactggaccaattgttgagatgcctgtagtgttggctattgtttctgctgttagtcattagttctcttcaattagggaatgaacaaaattaatttttcctgaaaaattgatgtggatggtctgccgctgtgggcttcatcttcgacatggtctcatcccttgttagaacaagttatccgtttgtaaactgctgatttcctaggagcattgaccccataaaattttcataaagcatcagttatttcattattcttctatgcagacttcactataaatttgctgtttggtcttacttcaattttagcagaactcatactgctctgacatctaaactgatgtcttagccttcatagtgtctctgactagatcctattcagacgtgttatagcaaattagtaaagtttattttggtgccaaaaacttttgaatccacgcatagttttttcacaacacattttccatgaactttttgaagacccttcatatattataagaagaaagttaaaaatatcccctgcatctactactcagaaataaccactgttaacattaagtctgttctcaactctaggcattattgagggttttgaggacaggtcttgaaaatttctatggctaccttttactgggtggagactagcatgtatagttgaccgcataggttaatccctccactcaaaaagccacaattttaaagtgtagtattcactagcatttagtatattcacagtgttgtgaaatgaccaccaccatctagtttgaaaatatttcatcacaaccaaaagaaaacctcatatctattagcggtctctcctgtttccccagacaccggcaaccactaatgtactttttgtctctgtggacttgtcagttctggacattttatataaatggaatcatgtgaccttttatgattgacctctttcacttagtataatgttttagaggctcatccacattgtagcatgtgtcagtacttcatttccttgtgtattggtccattcttgtactgctataaagaaatagctgagactgagtaatttataaagaaaagaggtttaattggctcatggttctgcaggccgtacaggaagcatgatgatggcacctgctcagcttctggggaggcctcaggaaatttaaaatcatggcagaaggggaagtgcggcgtcttacatggtggagcaggagcaagagagagaagggggaggtgctccacacttttaaacaactagatctcaggacaagtcagtcactataatgagaacagcacccaggggaaaccgccctcacgatccagtcacctctcaccaggctccacctccagcactggggattccagttccaattcaacatgatacttgggtgggggcacatatccagaccatatctcctcgtatagctgaatagtattcccttatatggacataccacatttattattaatttattgattgattgacaggatcctgctctgttgtccaggctggagtgcagtggtttgagcatagctcactgcaggccttgaattcctgggctccagtgatcctcccacctcagcctcctgcgtacctgagattataggtgtgtgccaccacacctggctaattttttttattttttagcagagacagggtttttgctatgtttcccaggctggctttgaactcctgggctcaagcaatcctcctgccttggcttcccaaagttgtaggattacaagtgtgagtttagagaggtataatttcttactcaacttcaagtattttatttctcttatcatttgttgtttggtttgttaattatttggaagtatatttttaaatttccaagcttagtgtgtgtcagtttcataaaagttccccatgtatttaaaaattggatgtgtactctaattttgggattgctttttcattgtctatatatgcttgctaatttttgatctgctgggttactgagaaggatgtgggtttctccatctagttctatttttggttaatatgttaggcacagagctgttgtttttttgtggtgaattgaatcttcatcattctttagggactctgtccttaataatgctttttttgccttacattttgtttcattgtaagagagctatgtcagagtactttttaaaacactttttaatatggtatatatttttttcttttttaatgaggttttttaaccgtaagtttaagcaaaataaagcttaataactggattttatttagttttaaatttaatttgatttttttttttttgagactaagtctcactctgtcgcccaggctggggtgcagtggtgcgatctcagctcactgcagcctccgcctcccgggtttaagtgattctcctgccttagcctccctaggagctgggattacaggcgtgcgccaccacgcctggctaatttttgtatttttagtagaggcgggctttcaccatgttggccagtctggtctcgaactcctgacctcaggtgatccacctgcctcagcctcccaaagtgctgggattacaggcatgagccaacactcctggctaatttaattcgatttttttagtagcagttttagtctattatgtttgttgtagttactagtatctttggatttatttctacctaattatttggtgattcctcttcttcctggttccacttacacattaaaaaaaaaaacaaaaaaaacttagaatagagatggtgtctcactatgttgttcaggctgctctcaaactccagggctcaagttatcctcctgccttggcctcccaaagtgctgggattacaggtatgagccaccatacctggtcccccttgcccattctgttttacttttgtattgcttgggtttctaaaattccattttgtcctctccctttgctcttccccaatcctatctcatcacacacactggtttggaagatagccacttttttttttccaatgtgtttacttatcttatcagagtcaaaagcctatcagtatcttctcagatatcccaaaaaatactaggaccttaagacacctaaaatcaggttacatttcttcataattgtctagtattctagttctatcagttttacctctcagatctccattctgtaagtcaatgttaagtttagatttgtccatatgcatacgagtttctttggtattcaatacttcctgtatatttttaagaagttcctttgttggaggtctgttaggttttatttgtttgaaaatgtctgtatttcacccttgttcttgaaggatggtttttctaggtatacagttcttttttttttttctttgatacagttttgctcttgttgcccaggctggagtgcaatggtgcgatcttgactcactgcagcctccacctcccaggttcaagtgattctcctgcttcagcctctcgagtagctgggattacaggtgcccaccatcacacctggctaatttttggtatttttagtagacggggtttcaccatgctggccaggctggtcttgaactcctgacctcaggtgatctacctaccttggcctcccaaagtgctagggttacaggcgtgagccaccgtgcctgacaaaggcctaactttccttcctcattcttttcatcttgtttcttggtttcatcatcccattttttagtttcttttcagtctccttttgtgtagcctgaagcaataactgtgtttctgatgcctaggtaagtatactgtaggtaggctgatactgttcagctagtacatagtagaagtcagatgtcacatttttagaatactccagttctagataagaataccttgttgggtgatatattttattatcctggattgtttggcggatgtaatggattgctgaagacgcccagtttcctgtgtggcccttgagtatttattttagtaagttagaggctagttgttcacttttcccttgtttaactggggactcctcagcagccctttcaaaacagtataacctcatctgagaaaggaaaatgtaaggatattcattaagttttcttctctccagatttgggattatttttaggaattctcaagagttttgttgacttaccaactaggtttcttgaagatggtgagtgaggataggaacttggcctggtttggctcacctctcagattcattggaagaggcaagttcattagcacagtttcagtccaccattacagcatttttttcctgaattattataagtcttagtcaatatttccagataatcatcattatctgtttaaattactgcacagtattctattttactgatgtaccattgtgcaaatactatgatgttttattatttttaagttttgctataacagataagtctgcagagattttattcagctctgtattgttttgcttctgttgcattgtttcctcagattgaatttctaggagtagaattgctatgtcaaagagaataacaagtatctctgagccttgccgcatactgcttttttcatttttaaaggttataccaagttagagtctcactagaactgaatgagtgtactaattttactgtagctagtttctttttttttaaaaaaaaaaaaagctgtagaataatctcaaggttgcttaaatatttctgtcttttattcttacagcatttcctgtggattagttcactacttattttcttatctgtgagttgtaagtgcttacacatgcccacttgatgaccttgatgttttcttacacatggaagcaagtgctttttgtaaaagaatatattaacctttatctttttacattttgtgaagctttttttttaatgtttcatcttttaaaaattaggtttattcagaattttaaattttaatattatattgaatttcttttggttggtttaaattgagaaagttattttatgtatattctctttttttgctagctttctgtaatttgattttaattccttattccttgcatagtttgcttctggtatgttaaagtgtgctctctctaagtgggtagtaattaggaacaatttatctcaacctcatttattgaatgttttaaatcaagagaacggactctgttatattaagcttctatatataattgtctgtttcactgtaatgcctagtaaggatacacttcattctttttttagatgttctttcacaatttcatgtaaattttagttgttttgtttcaaaaaacaattcctattgaacaatctctaggaatagatagcttaataataatattagatctagttttctcttttcatagtttacctcttctttcttttctttcttttttttttttttttgagacggagtctcgctgtgtcgcccaggctggagtgcagtggtgcgatctctgctcacagcaagctccgcctcccaggttcgcgccattctcctgcctcagcctcccaactagctgggactacaggtgccccccaccactcctggctaatttttttttttttttttttttttttttttttgtatttttagtagagacagggtttcattgtgttagccaggatggtctcaatctcctgacctcgtgatccgcccacctcggcctcccaaagtggattacaggcgtgagccaccgcgcccagcctctgtctctcttttctttttctttttcttttcttttcttttcttttcttttcttttcttttcttttcttttcttttctttcctttcctttcctttcctttcctttcctttcctttccttttcttttctttcttttcttttcttctctcttctcttctcttctcttctcttctctgtctttttttgacgagtctcagtatgtcacctaggctggagtacagttgcacaatgttggctcattgcaacctctgcctcccttgttcaagtgattgtcctgcctcagcctgccaaatagctgggactacaggtgcgcactgctacgcccggctaattttgtatttttagtagagatggggtttcaccatgttggccaagccggtctcaaactcctgacctcaagagatccacctgcctcggcctcccaaagtgctgggattacaagtatgagccacgatgccagtccaattcttgtgtagttttttaatcagctgaatttaacattcaaattcttcttttaaatcttccaataggcagttatctttataaagatcctatataatcaagactttgtttctgaatattttatgtatgtttttgctactgtaaatgagatctatttctcattgtggtttcttgctgttattactggtaagaatttagtgaaacaaagtacttaagagtatgtctttaaattgtgagattttgatgaacttttaagaaataaaattctttagtttcttagagctttttgagatttctaaggtagatccttggtttgggcaacatataactattacaagttttgcacattgaacgttatttggtaatttttagagaggacattttaaatgtttaggaaaaatataaataaaatgtagaatactattgggggcatatacatcatcagcactgtaactgtttcatatgaatcatttttgtacatatagaactctaaagtcctaatgaacagaattttacatttctataaatagaaagtccttaatagttgtgactgaataacttatggatagcaaattatttaactgaaaacagtaaaatttaagtgggaggaaatatttgctttataatttctgtctttacccattatttataggattttgtcactttgttctgtttgcaggtggaaaaccatgaattccttgtaaaaccttcatttgatcctaatctcagtgaattaagagaaataatgaatgacttggaaaagaagatgcagtcaacattaataagtgcagccagagatcttggtaagaatgggtcattggaggttggaataattcttttgtctatacactgtatagacaaaatattgatgccagaattattttataagttccctgtccccaagatgatgacttcacatctctgtcaaacagaaatcgcccaacaggcccttgtatgatgtcatttaaacaagccctattttaaatgtcacctccactggtaacaggatactcctaggaggatcaccaagcccaattcttctaggagtagtgcattgattaggctttggggtttccaagcagttcattaatgtcacttttggaaaaagtctgtctttcataccagcttattaattccctatgggttcacacggttttttttcctggattttcatcaaacatgtgtaaggtactcagtacaaagaagtttagaaatccagaacaaagcagtgtatttaagtagtagtaaacttccagataatctgatgcccatatctacatatataaaaaatttgcaaatagttctgtagagagtccaaacatggagtagatccctaattaagagcctttgcattaaagtccaccttcctcatttcatagctaaggatattgaggctcagagagtttatgtgtctggagttaaagttattttgtgtttccttaatttttgacttactagaaagttaaagtacctacagatttctgtgtttcactatatgttaacttgcttggctggaagtttttctgctgataattggttttatgaaggaagaatcctgttaagaatgcatcattggactgggtgtggtggctcacgcctgtagtgatcctagcagtttgagagaccgaggtgggcagattgcttgagtccaggagtttgacactaacctgggcaacatgatgaaaccctgtctctacaacaaatacaaaaattggccatacatggtggcacgcacctgtggtcccagctactcaggaggctgaggtgagaggatcacttgagccagggaggttgaggctataatgagccataattgcactactgcactccagcctgggtgacagggtgagatcctgtctcaaaataagaaaagagaatgcatcattggccaggcacagtgactcatgcctataatcccaatactttaggaggatcacttcagcccaggagttcaagactagcctgtgccacatagaccacatttctaccaaaaatcaaaaggaaaaaacttgctgggtgtggtgatgcacacctgtggtcccagctactcgggaggctgaggtgagaggattgctttagcttaggtggttgaggctgcagtgagccatgatagcaccactgcattccatccagcctgagggacggagtgagagcgacaccttgtctttaaaaaaaaaaacagaggaatgcatcatagtatatattaaattattgcctatttttttatctattttattgagtgctaataagaaaattaatggcaaaaacttgttttttacagtataaattaagtttaatttcattttaaaattaagtaaatttgttttattaaaaagtatgttgaaagcaacataaatagcactcaaattgagacagaaactgtaactgtagtataagaagcattaggctgggaattgggaaacacgagttctagttgcagcttggaaactttttctgaagctctttacaaattacttaatttctctggttttcaccacattgttctatagcattaacatgttggattcattgctttaattcttagacctacgtgtcatcagaaatgccattacactttgaggatttgagccttattttaaataaagttgtgatcctcatggcagcctaggtttacatgtgttaaataaacagtattctgtaaataccattgtctttcatgtttagtgatgttgctgttgttaacactgcagtgaaatgcatatataagcaaactacattacatactcatgaacatggtcctttgttttgaaactttgatcactgattgttcgcagtctttcattgtggaactactctttcactttgaatgttttgagaggttcctttgttcagatcagtccgatttcgtttctgggtgggtctctactttcccttttctcactggtcaagcgaggtctgtctaattgtttgctactactaacatttgatggccacgcttcagcaagtacatttgtagattctctctctctgtctctcttaatttgtggtctagagatcatattggttaatgaaattatgaagagggaatgtatttataaaaactcaaattcttgatgcagaaggtctagctgattgtgaacccaaaatatccgagacaggtcacaaccaatttagaaactttattttgccaaggttaaggatgcatccatgacatagtctcacaaggttctaatgacacatgcgcaaggtggttagggtacagcttggttttatacattttagggagacatgagacatcagtcaacatgtgtaagatgtacattgattctatccagaaaggcaggacaacttgaagcaaggggctttcaggtaataagtagataagagacaaaaggttgcatacttttgagtccttgatcagcctttcactgaataaacaagcttagtcttgttagtgaatctgcgtttttacataaacagtaggtcagaggaagcaatcagaaatgcatttgtgtcaggtgagccgagggatgactttctgtccctcacctgtgaagataagctatcagtttccattgctagggtgaaattcaacagaattgtttgagagtgaacatctggaggcccacaaggactttccttgtggaggggaagtatgtagtgagggaagtatgtagtttttaaatctttgtcgctatcttatttagaaataagatggaaggcaggtttgtctgacatagttcccagcttgacttttccctcggcttagtgattttgcggttccgagatttattttcctttcacatatcagtcagatcatttggtttgtgaagtttcctatgcttaacagaaaatatgtgcactagttttcctagagtttcattgtcagagtctcaagtttttgtttggaaattgtatttggtcacattaattatactctatgttagttccaaagaaatacctttggttaagaaaagaattctcatgcataactcctcgagggtggggttacaccttaatccatcctcaggtgctcatggtaattggggcaaatatgttgcccagtgctggtgctctgcagccttggatgggtttacccagaaagcagctttcaagtcagaaactaacattcataagggagttaaggattttataaatagatatccataattcatgtagttttcaagtaagtagtatttgaatcttttctggttagataataattgtgagtatgttgtcatataataacagtatgtttttcactatttaaataattttagaattacattgaaaaatggtagtaggtatttatggaatactttttcttttcttcttgattatcaaggcttggaccctggcaaacagattaaactggattccagtgcacagtttggatattactttcgtgtaacctgtaaggaagaaaaagtccttcgtaacaataaaaactttagtactgtagatatccagaagaatggtgttaaatttaccaacaggtttgcaagtcgttattatatttttaaccctttattaattccctaaatgctctaacatgatgtgaatgttctatgataagttttactaatgtagtcatcaggtaagagtcaagctttcttccatagagcagtcagctgtcgcaacaccatttgttaaatagtccgtctgttctccattgactgaagtggtactttgggtctattttaaagactctacttttacctcgtctcaccattcttttgtctacacaaaatatattttatcgcttattctgtgttaccatatctattagagctagttccccctcatatctctgctttagttattttcacatgtttcttttatcttttttttttttggagatggagtctcgctctgttgcccaggctggagtgcagtggcatgatctcggctcactgcaagctccgccttccgggttcacgccattctcctgcctcagcctcccgagtagctgggactacaggcgcccgccactgcgcccagctaattttttgtatttttagtagagacggggtttcaccgtggtctcgatctcctgacctcgtgatccgcctgcctctgcctcccaaagtactgggattacaggtgtgagccaccgcgcccagccttatcttttttttttttccccctgagacagagtcttgctgtgtcgcccaggctggagtgcagtgacgcgcagtcttgactcactgcagcctccacctcccggattcaagcgattctcatgcttcagcttcctgagtagctaggattataggcatgcaccaccacgcctagttcatttttgtatttttagtagagatgggttttcaccatgttggacaggctggtctcggactcctggcctcaagtgatccacctgcctcagcttcccaaagtgctgagattacaggtgtgagccaccgtgcctgacccacatgtttattttttctaagaaaactttactatcatttatcaagttaagaaaattattctgatatttcaattgggtgtttaaattagttgagggaaatatgaggccattcactagatgataggttttttttgttttaatcatgtttcatgttgaaacaaaaaagttttttcctgccagttttctggctaatctcaggaagtccctgaaacaaattattgataagtaaaaaaaattatttaaaaaattttaaattatatttaaaatcttctgtgacttatggtggggggaggctaaagcctttctccttctgtactgttctggaaactatggcctgttctactccctcccctcctgaattttcccagaactttacaggtagcttttatatatatgatcccctgtcgtctgtttaacaagtactttgagtgtctattatatgcagacattctaggtgttcagacaccctagtaattagtttgttcctcataattctcagtaaagaagacatgtatatttctcattttataggtgaagaagctaagactttacttttcctcagttagacagctagtgctggtgggtgcctaaacttagatcttccattgccaaatctaggtgtgttgtttttccagcacactagaatcctcctggttcaagaaatgtatatattttagcttggataagatacaacttttggagtgttctaatcatcttcaagtttttcgtggattagttataacatatgaaaaaagatagggctgaatgggccacatgatgccaaaagtgaaaaagtcactcactagattatgacctgcagaatctggtccttgcctgcctctgcttttatattttgcagcttgtcccttcacacagtggtctcacttttataatgtctttccctcatgcatttctttaattctttttatttgcctgttccatagtagtctgtttgtgctgctacttgcccctgtactgttcttgagctatacatatacatgtctgctgtgccattgagtgattccatcaaggccacaattatcatcttgatgaactgattttctcccactgctgataattacttctctctcctttctttctcctttacatcacctctttttgttcttaatttcattccctccttgatgccagtgagtatttttttcttattttattctcatcttccttgagtattgtttatttcaacctctttttttttttttttttttggagaagggtttggctttgtcgctcaggctggagtgcagtggcacaattttggcccactgcaacctccacctcctgggctcaagccatcccacctcagccacccaagtagctgggactacaggtgttgcccactgctttgtatttttaatagacacaggatttccccatgttgctcaggctggtctcgaactcctgggctcaagcagtccacctgccttgccctcccaaagttctgggattacaggattacagatgctgtgcccggcccaacctctaattttaattttctcttcaaattgttcaataagatttagtttcaagacattttcctggccgggcatggtggcttacgcctataatttcaacactttgggaggccgaggcaggtggatcacttgaggtcaagagttcaagaccagcctggccagcgtggtgaaaccccatctctactaaaaaatacaaaaattagccgggtgtggtggtacatgcctgtaatcgtagctattgtggaggccgaggcatgagaatcgcttgagcccgggaagcagaggttgcagtgagttgagatgacaccactgaaatccagcccgggcaacagagtcagactacgtctcaaaaaaaacaaaacaagctgggcgccgtggctcacgcctgtaatcccagcactttgggaggccgaggccggtggatcacgaggtcaggagatcgagaccatcctggctaacacggtggtgaaaccctacctctagtaaaaatataaaacattagccgggcgtagtggttggtgcctgtagtcccagctactcaggaggctgaggcaggagaatggtgtgaagccgggaggcagaggttgcagtgagcctagatcgcgccactgcactttagcctgggtgacagaacaagactccgtctcaaaaaaaaaaccatttttcttattttgaaaacttttggtattgaaagatatttatactacagtaatgagaaatactgtgtgtgtgtatatatgtttgtgtttttttttttgtttttttctttctctctctctcttttttttttttttgacagagttttgctcctgttgtccaggctggagtgcagtggtgctatctcgactcaccacaacctctgcctcccgggttcaagtgattctcctccctcagcctcccgaatagctgggattacaggaatgtgccaccacacctaactttgtatttttagtagagacgggttttccccatgttggtcaggctggtcttgaactcctgacctcaggtgatccacctgcctcggcctcccaaagtgctgggattacaggcaccctgcctgtgtttgtgttttaaaaggggtaatagcttcagtcttttttttctttctctgagacggagttttagttttgttgcccaggctggaatgcaatggtgtgttcttggctcaccacaacctccatttcctgggttcaagcgattctcctgcctcagcctcctgagaagctgggattacaagcacgcgccaccatgctgggctaatttttgtatttttagtagagacggggtttctccatgttggtcaggctggtctcgaactcctgacctcaggcaatccaccgacctcaggtgatccacccgcctcagcctcccaaagttctggggttacaggcgtgagccaccacgcccggctgtcttcaatcttaaataaggattccatttaaatattttgtaaaaggacacagatcacagttttactcaggggaatataattgttatagcaggaattgtgccattgcgctattccaaacagtgtaaaagaacattaataaattgaattctaactacatttgtccctaaggagttgttcgttttccacttgtatttccattttaattatcattatttggatgtttcataggatactttggatatgtttcacgtagtacacattgcttctagtacacattttaatatttttaataaaactgttatttcgatttgcagcaaattgacttctttaaatgaagagtataccaaaaataaaacagaatatgaagaagcccaggatgccattgttaaagaaattgtcaatatttcttcaggtaaacttaatagaactaataatgttctgaatgtcacctggcttttggtaacagaagaaaaatcatgatatttgaagtgtgttttgttattttcgcaagccattacattctgactatttaatatgttaggtttcctatataaaataaggcatggtatgttacagtaggacacataactggaagttactcttgcacatagaaacaaaaaatggcagaaaagcacaaaacttactatagttgtaacagggaaaggaaacactagggcctacaacgtactaatgtcttgggtcatctatgggctcatgaggctctaggttatggaagtaaataccactgaaaagcaaatattaattacacatgaggcaagcctttttgagttctgtatgtcattttgtagattttgagttcattctagtggcaccatttgagatcattttcatgtaattaaaggaacacagcaacctggcactgtgttattgcccttagaatggaatgaatatatgtttagcacaaggtaggaagtgatgcgttaagttggaaggctttgccgatcatggtgtgtatgttgactaacctttattgtgcctttaaaaaatatactcaagaactaccttaaccaagtaattaaagtcaagattaccagttgtgggacaaatgacatgtacttcctggtgtgatatagaaggaaggacacagtatcacctatatagtattcttgaccagaatatttaacctgattttaaacaagaagtaaaaattcaaataaatttagattgtggtgcattcaaggcctgaactttaataaatgtccatgtcacggcagcaaaaaagaaatcaacaggtcttaaagagacagggcaaccaaacgcagtaggcagtagttgattagatcccaatttagaggttggagttggggaatagctatagaggacactattggggcgaattgagaaagtttaatatgagacaatatggtgttagtgtcagatttcttgtgtgaaatggtagtgttatgattaggagaatgtccttgttctcaggatatgcatgctaaattatttaaggacaaatatttttttaaaaggttatgtgcatgagtaattctataaattgtgttgctattatgaattgtcatggtaaatcaaaaggaaacataaaactcaaaaggttttattttaatacactttatgtattgaaatgaatggaattgatttgtaaagattacatttttgcttgttggtgtcagataactgtgacgtaataatcttttgctgaattatgtttcttaggctagatttcattttaaagaaccctgtaaataccatttatttgaactgtggatcttccttaaaaaataatatttattaagcacctagcagggtaaagtttttagattttaacatttaaattgaaggttttatattagaagtcaacctgaatttaaatgaaacttcttcttggtctgatattacatattatgagctatttttatttaaaaatgtaatggcggccagacatggtgattcacacctgtaatcccagcactttgggaggctgagctgggaggattgcttaagcccagaagtttgagaccagcctagccaacatagggggaccccaactctacaaaaaaatccaaaaaatattagccggctgtggtggtacatgcctgtagtcccagctactcaggaggctgaggcaggagaatcacttgaacccaggaggtcgagggtgtggtgagccataattatgctactgtacttcagcctgggcgacagagcaagactcccatctcaaaaagtgtaatggatcactttaataattttctatcatacaattaagtcataaaaggtcatgctattaagagccagttatgtgacatgccaagtatagactcttaattaagatgctttggtttgctttttatttatttatttatttttcagatggggtcttaccatgttgcccaggctttagtgcagtgatgcgatcatgactcactgcagcctcaacctcctaggttcaagggattctccccacttagcctcccaagtagcttgggactactacatgtagtagtgccaccacacctggttaatttttttttaattatcttttgtggagatgaagtctcactctgttgcccaggccagactcaagcagtcttcctgccttggcctccgaaagtgttgggattacaggcgtgagccaccctgcccagcctagttttcttttttttactataaacttattcttgtcagtatgctagcaattttacaagttttaaagtagttatagcaagtacttcactcatgtttaattcttaaaggcttctattgctatataatagggtagtctgaattcttcaaaagtgtactgaggccaggtgcagtagctcacacctataatcccagcattttgggaggccgaggcgggtggatcacctgaggtcaggagttcgaaactggcctaaccaacatgttgaaaccctgtctttactaaaagtacaaaaattagctgggtatggtggcaggtgcctgtaatcccagctactcaggaggctgaggcaggagaatcgcttgaacccaggaggcggaggttgcagtgagccaagatcacaccattgcactccagcctgggcgacagagcaagactctgtctccaaaaaaaaaaaaaaaaaaaaaaaaaaaaagtatactgaaacagaggaagataattaggtctgcttggccattgttaagttgatttttattttcaaaacatttgatcactgttgtggggaacaagggaataaaaaataagttaaatttccagcccctagattaaactaataatttttggttttcctagaattaaatgcttttatcttgaatgttctgtgaagcttttgacatgattgatagctgtatgatagtctgaatgacatgtgggtcatgcaccagcccctccaacctgttaacatttagaatctattcagaaaaatttaagcattgttaatttcctttgttttttgtctagcatgtgtcagatttttttaaatgtatttattaatagcttttaatgttaatactctagaacagtagaatcttgaaaatgttttaagtgacaattagagatttaaatttatgctgacatcctctgcatgtgatactgatgaggaaagaaagccaaactgtcttacggtcagttcgtacaatataccaggccttgatggtcacatttcaacttgctacctttttgcttacatttttcttatggtgattttgaggtgtcattctggtttctcagatacttaaaatataggaaaaggtgtgtcttaaaattgagagaatgtcttggataagcagctgtgtagttttatattttgctgataagggaaggtactctatttttgttttttgtgtgtttttgtttgtttgtttttgagacagaattgcccaggctggagtgctgtggcgcaatctcagcttactgcaacttccaccttctgggttcatgcaattctggtgcctcagcctcccaagtatctgggtttacagacatgcaccaccatacctggctaatttttgtatttttggtagagatggggtttcgccgtgttaccaggctggtcttgaattcctggccccatgtgatcccccggcctcatgcgatctgcccgcctcagcctccctaagtgctgggattataggcgtgagccacccaacccagccagtactctgtttttgatagctattcacaatgggaaaggatgtagcaacacattttaaccctatgttgagttttaggtgggttcctttgaaattttgttaaggctaacttttgttaatttttttaaaaaagtgtaaattaggaaatgggttttgaattcccaaatggggggattaaatgtatttttacggcttatatctgtttattattcagtattcctgtgtacattttctgtttttatttttatacaggctatgtagaaccaatgcagacactcaatgatgtgttagctcagctagatgctgttgtcagctttgctcacgtgtcaaatggagcacctgttccatatgtacgaccagccattttggagaaaggacaaggaagaattatattaaaagcatccaggcatgcttgtgttgaagttcaagatgaaattgcatttattcctaatgacgtatactttgaaaaagataaacagatgttccacatcattactggtaaaaaacctggtttttgggctttgtgggggtaacgttttgtttttttttttttttttttaatcttggagtagaaatatatttaaaattgatggagaaaattcccagttcttaacattagaaagggaatatattattcttaccagttagtaatctattcacatttggtttagagggaagatttagaaggtgagataaaagcttgtgagagaatagtgtattcatgtgaaacttcttccatgggttcagagcatttagaaacaaacatcccttcacactcaaagcttacctttgagccagtcctccaatagtgaggtctttgaaggtcaggccaaattggctgtgggaggacctcaggttaggataggaattattttaagacatggcactatattcatgtgaaactcgcaaaaactagccttgcatataggctcatgtatcatgtctcagctgagatgtttgagagatcttaactagattctagaaaacaaaaaaggaagtagttttggggcaaatatatttgggaaacagtttattgtatttcctttccccaaatggattttcaagttcttcatataatctaaccccaacaaataaattgcctgtttttcaaaagaaagatcatgtcttcaggtttttgtgtggggtttaaatgattcgaaagatttgaccatactgatacattcactagtaaccttagttactaatgagtaatggttttgagttaatcagttaggcctgaactacttttctggaagttagtaaattatctcacaggcagccctgtgagccatgggaaaatgtgtatatggtctttctaggccacagtcaaattacaggtatatttgtcatggcttctcttgatgaaaggcccagtatcggtttgtctgaagatatataatagcattgcttttgggggtaatatgggcagtaactctgtccacatctttgggcaggctgtggttctgcctttatatgctatgtcagtgtaaacctacgcgattaatcatcagtgtacagtttaggactaacaatccatttattagtagcagaaagaagtttaaaatcttgctttctgatataatttgttttgtaggccccaatatgggaggtaaatcaacatatattcgacaaactggggtgatagtactcatggcccaaattgggtgttttgtgccatgtgagtcagcagaagtgtccattgtggactgcatcttagcccgagtaggggctggtgacagtcaattgaaaggagtctccacgttcatggctgaaatgttggaaactgcttctatcctcaggtaagtgcatctcctagtcccttgaagatagaaatgtatgtctctgtcctgtgagaaggaaaagtatatttgcagattctcatgtaaaaacatctgagaatgtttgtcttagtttaatagttgttttcctgtggactttatatactttgtattgtcttaaaagagtgattgatggtagctacggaaaactttgatttttaaaattgtctctttaagtagacaatttataagctactggtacgagttcaccttataaatctccactaccatgtttttgcttggactgttcacacttcctggaatggtccttcttgccgtttatccaacttctttctaatttttaagtccctaatgatgggaattctatttctgtagtgatttttctggtcatacgaccgtaaggtcatgggtgtttttctctgaattcctcttgagatgcctgtaacttgaaccacgtttttattctagacattactgaaatgttttgtctttatttcactttttaggagcttccttgaaggtagggactataccttctatttcttggtatctttttctttctttttttaaaagttttttagagagacagggtctcactcttttgcccagactggtctcgaactcctgggctcaggtgatcttcctgccttggcttcccagagtgctgggattacaggcatgaaccaccgtgatcctccttatttcttagtatcttctaaagaacattaaatatagtaggtgcctagtaaattatgtattgatttaacttctttgaggttctgttgtttgtgaagaattataaaagcaatacaaatgtttgtatagtaattaagcaacaggttaatattcatgacttaaaagattaaagaaataagcaaaacatgttagctggcaactcacagaaaaagaattaaattgccaatgagcacacgagcacatgaaaaattagcaaaagtttcacccctttacatatatttggttaaaattgagaaaagaatagtaatagatggtattggtaggactgtggcaggcacacaatttacatgaccaccaaaagtgtatgcaggtatccatgtcaccacaccctggtctcatcttcattcagttttatttattttttttaatctcggcctatttgattggcacgaaatgaatgatagctgccttatttggaattcctttgattactactagtgtgcttgataatgtaaaacaatattcaaaatctgtttttcctttcatccgttgtttgttcatgttcatgacctttttttttttttcctattctcctccctccctccctccctccctcccttccttccttccctccttccctccttccctccctccctcccacacaaaggtgtgtgctaccatacctggctagtttttaatttttttttttttttttttttttagaggcaaggtctcactatgttgctcaggctggtctgggctcaagtgatcctcccacctccgccttccaaagtgctgggattacagacgtgagccatcatgcctggcccttgcccatttttctattgaagttttagtgctttttattgactttgtttatatattaagataatccattatgtttgtggcatatccttcccaatgtattgtcttaattttgtttttgtatgtgtatgttaccacattttatgtgatgggaaatttcatgtaattatgtgcttcaggtctgcaaccaaagattcattaataatcatagatgaattgggaagaggaacttctacctacgatggatttgggttagcatgggctatatcagaatacattgcaacaaagattggtgctttttgcatgtttgcaacccattttcatgaacttactgccttggccaatcagataccaactgttaataatctacatgtcacagcactcaccactgaagagaccttaactatgctttatcaggtgaagaaaggtatgtactattggagtactctaaattcagaacttggtaatgggaaacttactacccttgaaatcatcagtaattgccttattctaagttagtataaattattgatgttgttatagaacccatttaccccttaattcacagtctgggggtaggaacatgtacatcatatttctgtatctcatagtaggaccactcattctaaagcattcacagaaagaattatctgtactctttttgggacagaatctcgttctgttgcccaggctggagtgcgatctcggctcactgcaacctccgcctcccgggttcaagcgattctcctgcctcagcttcccgagtagctgggattacaggcgcctgccaccacacctggctaatttttatatttttagtagagacggggtttcaccatgctggccaggctggtctcgaattcctgacctcaggcaatccacccgtctcggcctcccaaagtgctgggattacaggtgtgagccaccacgcccggccagaattatctgtactcttgaacatcaccatggaggcattttctgctacctcccatggcagtatgttttcttgttgaattaggataacaaacaatatgctttcaagttccaaagttctagctgttattgtttaacaaaatcttcattataattagcttattttgtgtttaagagtgtgttatagaaacaggttcatttaaagctgggggttccagaaatcttgaaatagtagttatcacatgcagagtgacttatctgttgttgtttcatcctttcaggaaagtttgtcattcgtgggcttgggatctagtcagatccctgtattgatgagattcacatgttataaggctttcaaaggttttaaaaatcatactataaggattgatttcactagtcaccagaataactttttcagatagcgctctgattttccacgaacacgtttttctgcatcagttggttgcacatgagtgagataatcttggttctttatcctttgttatttgtacttcattgggaatccttttgagttagtatatttgagtcattattattattgctgtagaattcaggaacttttagtagatctggcagcataaaattttgcttttaaatcattgtttgtgttttgtatgctatagaaatgggttcagaatattttttaaaaggccagatgaagtgtgaagatagaaaaacttcatccttcactgtgaatgtttaacaaacatttgcttctactttatttttgtttgcttcctttagttgtgcaaagtattcagttctagaatgcatgagatatatgacaaagccaaaaaattctttatagttgataaataattgtggcaaaaacagctgtatagtaactttgcaagcatcatttgattaaatgcttaaaaagtcttgactcagttttaactatttcctgcaaataatcaatatttaattaaagctactccaaattagtgacactttacgtgtctgtctttctccctccccttctcccttctcccttcccccttctcccattctcccattctcccttctctcttcttcctttcctcttcccttcccttcccctttcccttcccccttccctcttctcttcccctcccccttcccatcccccatcccttcccttcccccatccctttcctttccccttcccttccctcctcttcctccttcccttcccccttcctccttcccttcccccttcctccttccctttcctcttccctttccccttcccttcccccttcccttccctcttcccttccccttcccctttcccctccccctctcctcccctcccttaccttcccatgaaatgagaaagcctcagagatagtggcttgattaatttttctttagattaagatatttgtctaagcctttaaggtttatctattgagcttttttgtctcctatttttatttttcctactatgtttgtcgaggataaaatacagcactgtgtgccaagtcataatcacttttcatttgagacttaattaaaatgcctttattttaatgatatatttggctaatgtatttgaagtaatccgaaattaagttttctaatgacaaggtgagaaggataaattccatttacataaattgctgtctcttctcatgctgtcccctcacgcttccccaaatttcttataggtgtctgtgatcaaagttttgggattcatgttgcagagcttgctaatttccctaagcatgtaatagagtgtgctaaacagaaagccctggaacttgaggagtttcagtatattggagaatcgcaaggatatgatatcatggaaccagcagcaaagaagtgctatctggaaagagaggtttgtcagtttgttttcatagtttaacttagcttctctattattacataaacaggacactaagatgaaggttttttgttgttgtttgttttcctctgtgtttctagtgcttattttttaatcagtttttttgatggcaaagaatctatctctgtgttattttgatttctgcagtatatacatctgcatgatcaatattcgatttcaagtaccaaagtaggagtaaaggaatattaacctaggtttaaaattagtcatttcactaaaattagttattatggacgatagatgtctaggtatatctttgttcataaacgaatatatcaagttcagttattaaattacacattaggtaagaaaaggacaaagaaataaaaaagcatgattcataattcctgccctctatttgtctagaatttagttgggaagataagaataacgaacgtgacacagagaataaagtggcatatgacaaatatttattcaagaaagctatatgtggacgggatgtttcagttctcatgggagaagtggattttatggtgcctttgagtaatgggtcatatttgggcgttcacacagaaagacccaagcatatgcctaattttttattattattattttttatttatttatttattttttagacggagtctcgctctgtcgcccaggctggagagcaggggcgcgcgatctcggctcactgcaaactctgcctcctgggttcacaccattctcctgcctcaggctcccgagcagctgggactacaggcgcctgccaccacgcccggctaaattttttgtattttttagtagagatggggtttcaccgtgttagccaggatggtctcgatctcctgacctcatgatctgcctgccttggcctcccaaagtgccgggattacaggagtgggccactgtgcccggcccttttttttttttttttttttaaattagaggattactagttctcttcaattataaaaataaaagaatcttatttcactgcctggtcctggaaacatgtactgcaatatacattgtgacaactttttacctgtcatgtttttagcttttacctgtgaatgtcttatcattgttcttatctgaaggatagatagttgctacaataataatagatggtgtgtatggtttttgagcctaaaaagtgtagttttatctgttgtacctatacaagcaggagaaatataacttgttaataattttaggtatggcaggctgccatcctaaatatgaagtggtctttgtatttgcactttaatgtgttgaaatcatagctttcagtgatccaggattaggcagactcttttatgcaatctcttgtttccagttagaatagaagtcgtgtacttttgataacattaattataatatattttgagccctgtgaggttggtaacattattcccattttatgaatgaggaatgtgtgttaaggagtttgcccaagagtcacatagcaagtcatagtcatgctctctgaagcagcaataacttggcaataaaataaaaatgaagcatcttctgtatgtgttaacttttcagtgactgtttatgccttccagtattctttgtaaaccttgaattctttttttcacagatgattaaagtttatcaattgtaaaggtggaggaatttgggaactagacagtgcacacataaataataaatatgttcttcaaatattgggtgggctaatgtgggaggagtttgagaccagcctgggcaacatagtgagaccctcgtctctaaaaatatgaaaaataaaaaaaaaattttttaaatgtgtgatatgtttagatggaaatgaaacaatttgtcactgtctaacatgacttttagaaaagatattttaattactaatgggacattcacatgtgtttcagcaaggtgaaaaaattattcaggagttcctgtccaaggtgaaacaaatgccctttactgaaatgtcagaagaaaacatcacaataaagttaaaacagctaaaagctgaagtaatagcaaagaataatagctttgtaaatgaaatcatttcacgaataaaagttactacgtgaaaaatcccagtaatggaatgaaggtaatattgataagctattgtctgtaatagttttatattgttttatattaaccctttttccatagtgttaactgtcagtgcccatgggctatcaacttaataagatatttagtaatattttactttgaggacattttcaaagatttttattttgaaaaatgagagctgtaactgaggactgtttgcaattgacataggcaataataagtgatgtgctgaattttataaataaaatcatgtagtttgtggaatttgagatgcattgtagttcttcgcagtgtgacttcaaatattttggaagaaacaaatagctcagagacctcgtaaaatatcttaaactggagggctccatggagatcattgcgagtgactcccccagaatgtccatctgttgacaggagccaggctggctgcatacgaattagctaaggagcttattatatatccagagtcctaccgtgagcctccatcccgtctgccattctcccatccctggtctatgataagacttagaaatctggattttaacaaaacgtttcagattgagaaccttgatttagtctacttctcctattttacaataaagagatgaagcggttaagaattagctaatcctacgcaaagtgagggaaaaaggacagtctttttaataaatgcggcgggctggtggggtatccatataggaagaaatgacattggacccctactccatgtcatatataaaaacctccactttgggaggcgaagcaggcaatcacttgaactcaggagatcaagaccagcctggacaacatgacgaaaccccatctctacaaaaataaatgcaaaaattagccgggcatagtggtgcttgcctgtagtcccagctactcaggaggctgaggtgggaggatcacgtgatctgggagaggttgaggttacagtgagctgcactccatcctgggtaatacagtgataactgtgtctcaaacaaaacaaaacaaatcaccttcagtgatttttagaccaaatgtacaaggtaatactctcaaggttttaatgttttatagttctgcagaagataacataggaaaatatttttatgtccttggctttgggaagaatttaagtcacagaaaaacaccatccataaagtttgacttatttagctatttgaaattaacaacttctattaaaaggcaccacaagtgaaaagacatgaatcgtaatggaagaacatactggtacgttataaaatatcaaagagttgggcatggtgtcccatgcttgtagtcccagctactcaggaggctgaggcaggaggatcacttgagcccagcagttcaagtctcagcagttcaagtccagcctgggcaatatagcaagactgcatttcttttcttcttcttttttaatacctggaataaagaactcctataaaatcactaagaaaaggggtcacttaagaatctcattaacaaaaagaatttgaatatttttccaaggaagatatgcaaatggactgtaagcacatgaaaagatgcagatcagggaaatgcaagtcaaaaccacaatgagctacaacttcacactgattacgatagttaaaatcaaaaagtcagatggtaagtactggcaaggaagtggagaaattgaaactgtcatgcgctcttggtgcgaatgtaaaatggtgcagctgctttggaaaacagtctggcagttcctcagacaattccactccaacgtatatccaagtggaatcacaacatatgtccccacaaacttgtacataaatgtttatagcaggattattcataatagccaaaaggtggaaacaacccgaatgtccatcagcagatgaatgcataaatgaaacgtggtctatccatacaatggagtatattattgagccattaaaggaatgaagtactggtacatggtgcagcttagatgaaccttggaaacattgtgctaaatgaaagaagctggttacaagagtcaacacgtatgatttcattcatgtgaaagttcagaatagagacagcagtagagacaaagtagcagttcagggttggtgccagggaatagggggtaggtggggtgaaagctaaaggatacggtgtttctttgtgagatggaaattctaaaataggtgatgtttatacatgtctgtgaatatactaaaaaccattgaattgtacacattaaatggatgaattgtataggaattatattttaataaagctatttaaaaaaatccagacacttcacccaagaggaaatctaagtggtccataaacatgaaaaggtctttaatcaccagtcagaaaaatgaaaatgaaaaccatgccaggccacctcccaccaccatagtgacaagcatttcaagtgtggcagttccagctgttgttgaggatgtggaataacactggtaggggtgttaagattatctggtgaaattgaaaagacgcatacgacccagcaattctgctcttaagtgcatactctggagatgcttttgcccattgtgctgcgagatgtatacaagaatgttcctaatacctccacactggaaacaactcatcagtgaaaatgaactacagctacacaaaatgacatagatggaatcttaaaacgtttagtaaaagaaatgatacaaaaggatacagtttttttttcatttatgtgaagtttaagaataggtggtattgtttagggatgcagtctttgggatggcaactgtaaagaaaaagtgattgtgttaatcagagtgattgtctttagggaaatggagtgctgatggggagggggcacattagggcttctggagggccacagttctggtttttaacctgagtggtggttttgcacgtgcttgctttatagttagctgcaatttttttttttaatgcagttaaagtttggtatgagaacaaatgtatgaccgatgagtcctttcagtttaccaagttctttttcgtcatcgttaatttagagtgggttacatcagtttttcttttctggctgccaaaggcttaggaaaaaggcaaactgacagaggaagattttaaatgtagaaatatttattggtttacaaatccttttaatcacttatacatgaaaagctttcatataattcaaaaagcaaattttaaattccaatgaaatagttcatcccgtggttgtgaaagagtgtttttagattgctgcacagaagcatgtttaacgtggaaatcagctcatggttttagttgttagggctacaagaaattgggggagacttcattccaagaaaacatgtagtctgtcaggctgttttcattcctctaaaagagacagttttctaagatgtttttgaaaatgagaaaatacgtaatagatctgcttaagaagtttcaaacttaatctgtgcttattacatgaatatgctaatgtaaaaccaggccttcagttagtgtttccttccttttagaatggtgtatgtaaagcaaaatataaactaatttctgacctgtcaaaggttttttcttaaaatttaaatttataatgtggtttggtttttctttcccactcaaacatgaatttgggtaataccagaataaagctggatatataaattttatccaaaatttagaactctgttgttaagaaatctgttgaccacataaccatgtttctgagaaaatacatgattttttgcatctttaaaaaaaattagcactaagaagctaagatgaagttgtttttgtaatttgatttttttttccttaaaatactgttttggagttaaaagttgtagcaaaactggtataagaaagatgttttaagatatatttaagtcttgtctcatactctattgactaagctagcccggtgactagggtagatgtatttaaagaataacttttcccccttaaaatctcaatattccacatcctgttagacttcttgagtattaaatacatcttctatccttggtctttctgcatttagcttttttgggaagtatgtttttacccaagcatatggtatgagctgctgattcagtattgagtggctctttaagcttgttagttacattctgctgattaaaatggtgtacagaatagtcaggaaaaaccagtccctggtctgaaataaacaatgttaattagcttatggggaagaacaaatgagtaaggagaattttcatatacaaaggaaatctctgattgtctttctggactcagtgtgtttgggttaaggagatagggtgcggctggagaaaatgatgaaaatgttcagaatgttacatgtatttttacactgaaactggaagtggaagcccagtgtgatagttttctgcccgatgttggcctgtcttcacacccacaccacttatcttgattgatagagctactacttcctcttatactgcttcagaagttaacctctgtggtgcagtgctaggatatcacagaggaaataatcccttgtagacagtgtcttgttgctgggagttatcagtgcctcctgttctctctaaggagggcaatgggaagccctttccttgcatttgctacagccgtttccttgacctccctggaagaacagtatttcatggtgtcagacaacattcagaacatgctcaaattaaatgtatgtcagtatgcatttgctttggtgtgtggtttgtccaaaccaaagtgcccatacatgtctctggtccagccatgtgggaaattcagcagtggggtgaaccatatggaaatggcaggtgttgggcagccttgactggactgccctggtcttacttctggatttggtgagtagaagatcacactgttgcttgctgccctgggttcacctcaaagagggaaagaagaattagcaacttaaatggttaaatttagaaacaagaaaaagttctgtcagtgggcagtttcttacgtctaacaaaaaaaacaacagcagtgaattcttttgtgttcagaattaaccagtaaacacaaccttagcaattaacctatcactatcacgattgtttatttcctggaattttgttgacagaattagtccaataaatgttatgaataataattttatgaatagagataggttaatgccaaattaagtataattgaatctgagacattaatgcaactgttttaaattcaaccactgacctgcaatttttatatgccttgtccatccagcaagatacattttgtccatttttttcatgtttaaaatttaatatttattgtcaattccagtgtgtttcattgctaaacatcaggctcagccaaagcaatcacgaaaatgactccacgttgaatctttaacatcacaatgtggattaacaatttggcaacatttggctgggcgcggtagctcacctataatcccagcactttgggaggccgaggcaggtggatcacgaggtcaggagatcgagaccatcctggctaacacggtgaaaacccgtctctactaaaaatacaaaaagccatgcatggtggcgggtgcctgtagtcccagctacttgggtggctgaggcaggagaatggcatgaacctgggaggtggagcttgcagtgagctgagatcgcgccactccagcctgggcaacaacaacaacaacaaaattggcaacattaaatactttgtcagtatctgaaaagtgcaaagtactgtgcttggctccccaaaggctcctcttaatcctgaaaggcaggtgcttttattatcttttatcttattatctacattttccagatgaggaaacgtaggtacagaggtttagtaacttgcccaggtcacatagccagtaagtggcagagctgggatttgaaccccagtaccctatctccagcgaatctgagatgtacatgtgataaatttaatctttctcaataaattattaagtgtcaaagcaagtggtatgggcaatgcaccaggattaagaaaaacagtgtgtggtaaagatgtaaaatatttctaattctgttgtgggctgtggcactcccgtggaaggcttgccacagacacagccagaggcatccacgtgggcccctgctgcacacctggtttgctgctaccaaggctgctctcccgaggcttgttcacacaaaggaaagtgagcagctaggaagctgcatatttgaaagttgactagtcaccaaatgctggcatccaaccaagtgattgcattgtaccctgtttggatgaaagattgtgtttaaatgaaaagagagatgatgagccagaagtgtggcaaatgagttaaaataaattgtcagcagtgtttgaagcaggttgctgagggctggtgtcctgaaatccggtcacttggaggatgtatatgttccatcaggggccggaaatgttttatccaagctttagggaataaccctggagattctcttcgttactctactgttaagtacgtgcttacggagtaaacttcgcatgactaaggtttacaggcctgaatgtgcaactgagttcaagtaagcagcaatgtggtgtattaggaagactgcttgacttgggttctaatccttgcttcaccacctagctgtgtgactttaaacatcactgtttttcctcctgccttccttctgtaacttaagggggttggattattagagttctcaaatgccataccttcaaggccaggtgcaggatgcagagaatagtgggttaaagtgaacacctcaatgtaaaatcattcaaaaatttaaaaacatcacggaccaaacaaatatgtctttaaatctgaatttggttaaaggtcacaagtttatgccctttggagtactctctgacattttcatgatgatatgaaaggatttttccatacatactcaaaaggcgctcacgcctctgttgcagtcagtctggccacttccaaatagccaccccatgttggtctccacttcttccctccctctttaagtgctatgttaataatctagcttataattctctaatcagcagtagagcactttgctactttattttttattgttaggggtgatcttagcagcccaagtatgctaagtcttagaaatattcatcagtgatgtttttccctgaagctcgtttggtgactgctaaactagaaccagaattggagaaaaacgaccctgtgaattccaagccaacaaagccggggaagaggcattgagcaacctgtggttgcctgagaaacaaaaggcaaggtggttggatgaaagcaacacttccaagccttttccagcttaacgaacataagtctaggttttggggagagcctatcttagtgagagtgaacaaataaagtaggctgtatctttcagaattgggtatgactcaaataactttttttttttttttttttttttttttttttgagacagtctcactctgttgcctaggctggagtgcagtggcatgatctcagctcactgcaacctccacctcctgggttcaagtgattctccggcctcagcctcccgactaactgggattataggcgcccaccagcacgcccagctaatttttgtagttttagtagagacagagctttaccatgttggccaggctggtctggaactcctgacctcaggtgatccacccccctgggcctcccaaagtgctgggattacaggcgtgagtcactgtgcctggcctcaaataactttcaagattgaataatagtagcttgaagcaagtctagagacgagccagctggaggacagggccagcaggaaggaggtatgcaaggaaaaacctgcaatgaatggacctactgtgtttgagggtactgagaggagtttggggttgaattaatacctacaaagcatccacaaagcaattgggaagaaagggtagggggactattaggcctagtcatatcaaacttttttttttttaaaaaagagtaaatgtcatgatagtatactgcccacctcaattgtaaaattttattttatttcgtttttagatggagtcttgcactgtcgcccgggctggagtgcaatggtgcgatctcggctcactgcaacctccgcctcctgggttcaagcaattctgctgcctcagcctcccaagtagctggcattgcaggcacccgccaccacgcctagctagtttttttgtgttttttgttttttttttttttttttttttttgagacggagtctcgctctgtcgcccaggctggagtgcagtggcgggatctcggctcactgcaagctccgcctcccgggttcacgccattctcctgcctcagcctcccaagtagctggcactacaggcgcccgccactacgcccggctaattttttgtatttttagtagagacggggtttcaccgttttagccgggatggtctcgatctcctgacctcgtgatctgcccgcctcggcctcccaaagtgctgggattacaggcgtgagctactacacccagccaattgtaaattttattcatttaaacaccaacaagtgatttaagaacaataataaaataactgtagctggtatgatggctcatgcctgtaattccagctactcaggaggctgaggtgagaattgatgaggccaggagttcaagaccagcctaggcaacatagtgagacccccccccacccccgtctctaaaaaaataattaaaaaaaaaataactgggcatggtggtagtcccagctacttgggaggctgaggtggggaggtttgcttgagcccaagagttaaggctacagtgagctgtgatcactgcactccagcctgggtgacagagcaagaccctgtttctaaaaaataaaaattatattgggatgatggaaaggtataaatctgctctttctgtaagatgatgtctaaaattggaaaataaatagtggtataagcatgttatttaaaaatttagaggtaagtgatagaggattgtgaaagtggctacctctgggacagtgaacagggcagcattgagaagggagctgccatttttcatcataagcctcatgatgatcctatttgattttttttaaagatttgtgttcataaaaatgaatattgaaagtgaatgcaggaaaaaaactgtctaaaagtatatttaaacagtgacattcactttgcacattgacaccttaagataaatccaatgcaatgtcatactcttaccccaaataagttgcattgtaatgtaaggtcattctcttggggagaatctaaactgacagaaaaatctgtcttaaggagtacctatgatcacaaagtacttcaagcaccctttaaattgtgattaaagataatttgttgtttagaaatatatatacctaggtctggggaggaatagaagggaaatggagagtgactgttaaggtttctttgagggatgatgaaaacgttctaaaattaagttgtgataattgcaaaactataaatatattagaaaccactgaattgcacatttaagtgggcaaactattacggcatatcaattatatcccagtaaagctgtttaaaaaatagtagcataaataagatgtaataatagccaacatttgttgggagccaatagcctgagtgaccagctcagcattcttgataaccacccccttctccctatctcctttactcaataaatatgaagggctctagaagctcagggcccttgttccctagaagcaaggagcccccgaccccttcttccaaacacactcttttgtctttgtctttattcccatgttcatcctcctttgttcagtccagcatggtctgtggcaaacattcaacaatctctaaggtagataatattatcccattttataaatgaaacgggcctagaggagctaaatgactttcttaagaccatcagacatgaatagattagaaattatttttctttcatgtaaaagaagtctggaggtaggctgtctagggctagtaaggtggctccacgattatgcagcagagaccctggaacctttgagttggtttctccactgtacatggcttctctcaaggtcacctcatggcccaagatgactgccagggcttcaaccaatgcatccacattttaggcagcaagaacgatgagagtgcaaagatgcttatcccacctttaaagaaacaaaagtacacagcttccacttgcatcttccatgggagaactgagtcacacatctatgctgttggagcctaggaaatggagtcttcactcccaaaactcattttgaaaagcattcgcgttttgtgaatggcaaggagtttccggtttggtgcttggtaaatgctttgagatgatgatgtctcttctgcccaccatcttcacagcctcacctagtctttcatatttatttccgctcaaagcttcatttggcctctggtcttccttctctttctctcacagcttttttggactctatcctgtaatcgcttttccactgaatccaactaaacactcagtaccttgtctgtctcgttcatcgtgctaggcacagtgctaggctctcaggaaacatgcatggagtgtaggttccttgggggatgtgaattatcaacacccttgagcatggctggaacgaatcgcccctcccgaggacagacaggtagagccagagtgcagggcagtctcccagctcgctggaggcagagctggcctggagcctggcctcctgaccctcaggtgcctcctctcaccctgagcttcccaaacaccgatttccaggcaaagcctcatcacacaacgatattaagtaaagtaaaataggaacggataataaatttttatgtatgcagaaattgtttctctcctcccctcctcttggggttgattaacttagctggaagtaatgaacctgaactgattttttgagcaccagatctaagtggtaattactgagttggtaccttgtttatagactttcagaagaccgtaatacttactaagagaatccttttctcctctactcccaccagtttctcccttggcatgagaaccgacaaaccagaacataaatgagctggaggagagagccctttcttttttttctaggagttgtgtcatatttctaaagggcagcactgtaagtactctgctcccttcagggaagaaattgtgcttccaggacccctcactgagagcaacgccagggaaagaatggccggctcaggacttccatcgcggtcattggccaaactccttccttctgagaatcttactgacagaggccccagggtcatctcatggggctttctgaggccagtactgctttcttctgactttcctcagtagacatctatggctcttttaatgacattctctctccaacctgcttggactccatccacatctttctttgggttcctccttctatgaaggagactcctgtttgtcctcaactggcctctcctggggttcaaaggcagcccttccttcgagtctctcgtgggttcgtgagcactctacctgcttgtttttgggtacttggtaagcccggcatcacaatctcccctggagctagtcccatggtgacacctgcccagattctgtggtcaccagaggtttcaggtgatggttcagagagggcaccgtttcccgggaggcttggggacttggcaattcatgggctttatattctcttgtatatcccacctgggccctggaagcccagtagctaagtgaggagaggcacaacctcctggcctgaagctgagttgcttctattccacctacaggttttcctctccctgttccctctcctggagcttccagatctctgccaccctgtccccctattcaccccagtgatacaggcagcccgagggctgagttctgtgacagcaccctcaccacttcaaatatgctgacatcggttcttcaggcctgggccactcactgagcaatttgatcttccatttatgcctctgcccagctgcgtcctgatcggtggctctggcctgctctcttcttgtcctggcttcagcccttgcgcctgcctctggccagccgagcttcaacagccagagcaccagctcctgcacaggtcgaggctcaagccgtggcagggccccttccccaagcagtcttcatctcatgtagctgtgacagtccttggatgatccgagctgggaggggcttcaaacaactgtatcaagttcaaacccttgatttaaatgtgaggaaaccaccgacccaaggccacacaggtagtgtgaggtggccattgccaggaaaggagggatgggcagttgtgtgccccatcctgagtgtctctggcagctggactggatgaccaccactaagccttccacaaactcaaatctgctttgacagtgaggagatacctgatgtcttgtttgttccccagtccctccctgtctttgctggttgctgctgctaccaatcacatggcccgttgtcctgcccacagaagtggaccaatgacccaagccatgtcatcagctttagattctgggaacgagaagctctccttcctccatgattattgagcttgtatgctgctatagccgtctgtgggcataccccacctctacctcttctcatctttgtgtaccctacccagccatcccggggagcctatcagcagtgggaaagaatgagatcaacatagacgaactattccatgttgatggggaaaggggcatggtggagcaaaagtgagctgagcacattattggagtccttgggctacgtcagggagtctctaggtcaccaagccaaccagttcctttttggcttaagctgctctcttattctcctacaccaactgggtatccaacaatgcaacccaatcctgacaataactatccggacggcataggttaagggcttggtcccacaagactgtccccacttcagacatcagctgcaaagaaggtgcccaggctacccacatttctgcccaactgactataaatttgggggttcccaccagccctcttcatgtttgataatttgctagaacaactcaccaaactcaggaaagcactttacttactattattggtttattataaaggctaaaactcaggaacagccaaatggaagagttgcatagggcaaggtatggggatgggagtaggggtggctcagaactaccatgtcttcttgggatgcattaccctcccagcaccttgacatgctcagcaacctgtaagctccctgaaactttgcttgggaattttttttttttttttttagattccattaagtaggcatgattgatgaaatcactggccattagtgattgaactcacactccagactaggtgtggtggctcccatgtgtaatcccagaactttgggaggctaaggcaggaggattgcttgaggtcaggagtttgagaccaggctagccaacatagcaagacccgatcttgacaaaaaagaaaaaaaattaaccagtcatggtgatgcaaacctgtggtctcagctacctgggaggcggaggtgggaggagccaaggaggttgttctctcttgagattggagggtggggctgaaaattccaaccctctacacacagggttagttctggctaccaaaccctgtcttgaagctatctagggtcacctcattagcataaactcaagtatagttgaaaggggctcattataagtaagaaaatacacttccatcattcaggaaattctcagggttttaggagctctgtgctaggaaatggagacaaacaccaaacaaattttatataccagaaatgctataagtgcagtttctgttgcctgtgaccaaagggtccctggatggttcaggcactgatggagccagaatgaaaacccatgacaaccaactcctaatgggcctcatgttctgtgaactactcagattccaaatgcatcaaagacaccactattgaaggcaagtctgattgttttgtgggctcttgcagaccataaatgtagccttgcacgcgtgggtttgatcgaagtgaggttctatcagtaacatgtgactatgcctctttcataggttgttgcttcaaagagaaaaataaccacttctgtgctgttctatgtgtacggcatccagcatgggtgctcaagtagaatgaaataaattcacccaagggtccctactctgcctctgcacctcagacctttaacctcatttgtagaaggagggtgacaatcgaatcgatgtaatttacctatctactaataatcagaactcttttgctttcaggtgagagaaatgcaacccataccaccttctaccctaagaaccatctgaggttaggggtgctgatcccaggcccagctgggttctaaaactggaggggggcatgcggcctcatcctccctcgcttcctctctcatcctgagtgtcatctttgtctttcggttccttcatgtggcaggggacgtggccactgaaagcaatagggtcagatccttacagtatcttctttttcttttcttttttttttttgagatggagtctcacactgtcacctgggctggagtgcagtggcacgatctcggctcactgcaacctccgcctcctgagttcacgtgattctcctgcctcagcctcccgagtagctgggattacaggcacacaccaccatgcccggctaattttttttttttttggggggacagagtcttgctctgtagcctcggctagagtgcagtggtgcgatcttggctcactgcaacttctgcctcccgggttcaaataattctcctgcctcagcctcctgagtagctgggattacaggcgcctgccaccatgcctggctaatttttgtacttttagtagagacggggtttcgccatgttggccaggatggtctcaaactcctgacctcaggtgatctgcccgccttggcctttcaaagtgctgggattacaggcatgagccactgcgcctggcccttacagtattttctcagagggaaagaaggcctctgtcttcaggggccaccttagatcccagaaggattctgacacctggaccagaggcagagaccgccagggcaactctacccgaaccaagaggaagtggggacagatactctcctttgaccaaaactttaatgaggctcgtctgagaccttcctgaccaggcccagcctatgtccttgcagaattcagtttgagcaagaatcctgccgagtcagggcagggaaacgcccccagccttggtatctgaccactgtctacatcttatcagcctgatctgccttcagcaagagtcctattgggttggtctaacaggattcccctctccccgatgttttctctcagttattttccattcactgacctccaccctgcttcatggctgcaagtccccacttgcccatgctgtagtcagaatcgagtgcaatctctccccacaactgcaagaccacactgcagtgcagcttgttcctctgaccatggctccccttgtgtagtctgccttactatccataacaagtgtcatgaataattttttctttaacaatacccccctccaggctgggcacggtggctcacacctgtaatcccagaactttgggagactgaggcaggaagatcacttgagcccaggagctcaagaacagcccaggcaacatagtgaaaccctctacaaaaaatgcaaaaattaatggggtgtggtggtgtgtacctgtagtcccagctactcgggaggctgaggtaggaggatcacctgagcccagaaatttgaggctgcagtgagctgtgatcatgccactgaactccagcctgggtgacaagagtgagaccctgtcccaaaacaaacaaaaacaataaaataaaatatccccctccaaaaaagtgaagggttgacagtctgaggaaaacagcttgtgtctgcacatatatatttttttttaggtagagtctcactctgttgcccaggctggagggcaatggcatgatcttggctcactgcaacctttgcctcctggttcaagtgattctcctgcctcagcttcccaagtagctggaactacggggtacatgccaccacacctggctaatttttgtatttttagtagagatgggatttcaccatgttggctaggctggtcttgaactcctgatctcaagtgatccacccatctcagcctcccaaagtgctggggttacaggtatgagccaccacactcagccatctgcacatttctttataggagacttgtgaggattctaggagagaaggcatgaggaaagctgagtacagtgtccagctcccagcaaatcctcaaccaatgtcagttgctgccacaatgatgacggcagtggtgatgaggaggggaggtgggatggggagttgggagttaatgtgccctgtgctttgatgagggcggccagcgtgtagcccagtggaactgcactccagcctgcaagctgctacatgccagggtgtgtgtggtttgtctgctcagaggggtgccttgttctacttcatgctaaggcactgcaggagctctcaatggtcctgggaaaaagaggatctccttgtactaaggtatgaagagctaagttcctttgctcatcaaaggccagaagtggggaaatgattttaatgtcttgtaagagattgccgaattggagcacaatttgcaactgatggtgtagtgaaatgagaaaggttttggaaaatcatttccaaggccccagaagctgctgagcctggatggctttctaagtgggaactgaaactggcccagttgtcctatagaactgatgtttactgtttttttgtttttatttttgtttttttttttttgatagactgtagaaatggagcctcctgctctgaaaggttgaaacttacatttgtcttatctgagttccttcctcaggaaactgaccctcaggcctggcagatgttattaggaactgaaacttaccagatcaccacatcagggcaatgagacaccagacccctcacgcatcatgattgcctaagcaaccatctgttgtttgaccaactcgttttccttacctctccctaattcctgttttcccacatgtagttacaattcttccctgccacatgaactcctaaattcagctggtccagctgatcaatttgagactgatctcccatctccttggctgcagcacccaaataaagccttcttccctagcaatgttccttgtctcagagatcagctttctgtgcggtgagcagcaggacctagactgaagccctggtgtttcggcaacagaatcagccgcaggcatcagaggcagtgggcacctaacaatattctgttgttttgagcttggggatccaggcagatcctttgcctcctgaactcggctgagggaggctctgctgagtgaggacggcaaacatctctcagaagggaactaaaatctattgcacacttggtttgtggtctacactctgcatggatgatctaatttcatctgtacacaaccggtaatgctcacagacaagaacaaggaggctcagaaaaggaaagttattcactcaaggacactgagtcgatggaaggaaggaggactggcttccactgtgcctcctcacctcctgggagtggctcacagaacagtcacgatcactgtcactctggcactcagacaagctggttgtgtaggcaaggtgtgtgaagtcctcacagccaagtaagataatacacagagatgtatatatgtatgtatttatttatttattttgagacagtctcctctgtcatccaggctggagtgcagtggtgcagtcatggctcactgcagcctcgacctcccaggcccgagcaatcctcccgcgtcagccggccaagtagctcggactacaggcacacgccaccacatccagctaattttttatttttcatttttaacttttttttcagagatggagtcttgctctgtcaccaggctagagtgcagtggtgtgatctcagctcactgcaacctccacctcccgggttcaagcagttctcctgcctcagcctcccaagtagctgggactacaggcgtgcacctccttgcctggctaatttttgtatttttagtagagatggggtttcaccgtgttagccaggctggtctcaaactcctgacctcaggcaatccacctgcctcaacctcccaaagtgctggaattacaggcataagccactgcgcccggcctatttttctatttttatttcttttgagatggagtcttgctctgttgcccaggctggagtgcagtggcacgatctcgactcactgccacctctgcctcctgtgttcgtgtgattctcctgcctcagcctcctgaatagctgggcctacaggcatgtgccaccatgcctgtctaatttttgtatttttcgtagagacggggttttgccatgttggccaggctggtctcaaactcctggactcaagtgatcctcctaccttgacctcccaaagtgcagggagtacaggtgtgagccactgtgccctgcctacacagagatttagaaagctaaaaggactcacccaaactcacacacttgagaagtggcagagttgggtcttctgtctctaaatctaccacaccaaacaactcaactggcagcattttctcagcaacatctttgcaggaaccttgtggtcaattcctcctgcaggggtgagtggcagcctgcagagagttctgtgagtcaagtgtttcaacatatggatggattgttgttttttactgtggcaacaaaaggtgtgagatttttgtctttcatcagctacaaactacactgttggtcaggcacttttactgggagatgtttttcccccgattcttcctggggtgacttgaaatgtgggcaggatccaggaggtggagagagaggggtctttgaaggggtggaggtgggctgctgacactgaagagctctcagctgattgactcacctgcacatgactgtgtagggaatgtctggcccaaggaggcttcctgtaatgtatctatcatctcttcatttagctcattttttgggtttcagaatccctcgtggaaggtccatttaaaatcttggaagaaacctgggctctgcagattgtcctcagtggagcaactaagagctgaatacagtaaaatgaaaggcaagacaaagtcatttcctgggttaggataattagaatttgagtcaccttcctgtgtaaaaggaaacaaacattctgatggtcttcatcagggaaagagaaatgttttatcaaataaagtgtaatcctggcagttggcttcaactgaggcttgaagagaggcccggggtgtttaatctcctgacattttccctgtacctcttttatgacacttttcactttttgccaagttatttataccatagcctttatagttaatttttgcttctagattatatatttccacttctgtggacaacttgcagcagtttgtgcatagtatgtattcaaaaaatgaaaaaatataaatacatggatgaattactgaatggatggataggtgagtgaatggatggatgagtggatggatgggtggatgagtggatggatggataaatggatggatgggtggatggatgtatggatggatggatggatggatggatggatggatggatggatggataaatggatggatggatggatggatgagtggatggatggatggatgagtggatggatggatggatggatggatggatggatggatggataaatggatggatggatggatggatgagtggatgggtggatggatggacggatgagtggatggatggacggatggatggatgggccctggtcatgttcacataagaaaggttgaacttgtgggagaggaggcaaaaagaggaagtgatagtcactgaatgtgtgtgctagacagtatgtctggcactttataatcattttagttaatcctcacaacaatgcaataaggtagattgcttgtttccccatttcaagatgttgaaactgattctcagagaggttaaagaatttgcttaatgggaccctcatctagatcagtctgaatagaaagaactaccagactcttaaagtcagcctagcaccaagtagacactaaaacattgatttttgtgatgttgtttcccagaaacattgagtcagaaagcatgtggatgcagattaaagtggaacaggctcggccatgactgagcatctgcaggaggagctgaggaaagagctggcctcctcaaggcctgggtgactcaactgtcagcctccaaagcccattcccctccttcattggagaggagtttgaggacagttgtggttgaacccccagcaaaactattccaaaacgccgtgtgctggggcaggtggggcctaggccaaggccatttggccctgcctgctgtggcccttctcccctcccatgtcttccagccttgcctcccccacaggctgcagatgacacccttcgcagtgcttattctggagtgtaagagctgagagcaggagctacctgggggttgaggggtgggcaggctttagagaaggggagagaagaggcctcactgtgggagctgggggctcccaggagccacatttgccaggcttggcttcaagctgacatcactatcagagaagacaggtctggggaatgagagggcccaggagttcaggagcccaaactgtcattcagttttggaagccgaatccccagcacaattgtccaccttgctggcagcatcctggttcccaaagcctgtcagcccggggctgcgggcctctctctcacaaagccttgtctaggtgacttgggaggtgaggcccctgttggtcagccccgttcctgatggaacaagccaccctaaccgctctgtcctctcaggtcaggcttctgacaagccacaatgtgggtgagcctttgtgcactgcctgcccacctctcaccaggagccctctctccccatggcctcaaggtaccagtgaggcttttttctgtctcagcctggccataagcagccctctgcaagagttccgttaccagtcatttgcattgtagtataagtggaaaccacagaatcgccttcctccccagttatttatacttcaagtcatattgtagagagaaaatttctgtcagcaaaaatctcaggaatcctcctcatttctatttgtatggctttcaatcgttgacatgattttttcacatatgtcatcttctggggatggattcgtataaccctgcttcacttgcttccctgtgggaggctcacttgcttctcgacaggctctggaagaactaggcagtctggtacatggttgtgcaagaacccttgagggggccttggagtgtgtgcttgggccctggaactcatgcctaggatggagggctgagattgccccttcccatccaccagggagttgacaagggggagaagaaacttcttgtgagcttgcgatgacttgtggcacttgcatcagaccttggagttccctggggagaggcactcttgggtatgacactgtatagtgccacctgattgccatttgacccagtttggccctggatccttgagcaagagggctggaaagaaagacaggcccactttttgggacactattagggtctgtagcattggtggggagagaattcccccaacccccaaaagagctgaaaatgagacacgcgtggaggggtgaaagtggagtgtggtcaacagtgtggttacagagatgtgtgtcggggccactcccactcaccagggagactcatgaagcagaagggatggggcacaatgtggcttccataggcacaccaagccacctggagagcgcatcagccctttgggtacccccaagcggaaggaggttgggtctttgggtctgggaactttggtgcttgttctggtgggaagggcagggagtcaagaccagctgtgtcttccactgctcttcttgtccactttggttactggcctctgttggcatgaactggggaggcagaggctacctacagacgaggaactgtgtggagtgcgagtgtatgcagtaaagggttagcttagctgacttgaggtactcacacccatattccgaagaaaagactggccctcagcctgagcctccgaaataatctctaagcccttagaataccctgctttgtattcaaagagtatctttgaatgctgaacttagaaccactctagaaaatgtatgctaacaatgcgatttatgatgaacacttgtctttgttcccctggggccctgggccacattgtatcagtttgagccctagagggacagagaatgagaaactaagatcagtcatgcaggtgctccaggcctatgtgaccaaccaccaataaaaaccctgaacatcaaggctcaagtgagcaatacagctggtcccaacttacagtggttcaacttgtgagttttgcactctacaatgggtttattgggacataacccagtggaggaggatctgtacttcattcacatgtgttgtcacatcattactgggagaattaagcactgtccacgtgaatccactgggagaggataactggaagcttgcacctggcttctcctggattctgctctgtacgcctttttcccttgttaattttaatctgtattctttcactgtagtaatctacaactataagcagaatagcttttctgagttctgtgagtctttctagtgaatcattgaatccaaggtggtcttggggacctctaacaaaagatgtctggacctgaacttcctgttgtttcaaagatcctatagcaggctgtcttaccaactttcagcatcaagaagctggtggagagtgggttagtttaaaaatgaaactggggagagagatgaagccgggggaagatgccgtgaaatctcaccttataggcagcctctgattcacctgagggtttttccttgaatactttctgggtacaagtatttgagacaggtgatgtgctggtcactttattctcagctgcttgtggcctagccctaacatgggcactggaaacaatgggggtaggggttgatgatggagaaatggggagtaaagggatttaaaactttgaaaaactgagctgtttccatgatttgtctcttttgattctcacaaaacctttatgaaatatgtgctgacattttaagctctcacttatagtgagaaaagcaatcttcagcaaggtgatgacttgtccaagggaagacatggtcgcccttgttccttgggagattttgtgctcccaggggaaagcataagccctcaggagccatgatgagaacagctgtagaacagcaagtgaacaggtgtgtatcagtcaggataggcaaggctaagctgcagtaataaataatccccggatctcagtggcggaacattgaggaggtttatttcttctttatacaaatatgctgtggatcaggatgactctccaggcaactgtctgtgggactgtccaggtgggcttggatcacctggtgttgggccttgaagtcggtaatggagaggacatgttagaagagaaggaacttacaagcagtgggagtgcagcgcccttttgtggataggggtcaaggcaatgctttccaaggctatgacttggtgtggtcgaaaaagtcaagcagtcttcactttttgctgtggtcccagcaaatctgcttccaatccaggcttctcccatataaaaagcctcctttgtgtacagtgagtgaactagaacagggaggagatgccagtggagcttggcttgctccttctgtggccagctggcttgttttaccactgcctttggggtacagtggcagctgtggcaaatctctctggagtttctctagcgggagcgaagcacctaaagcacatgggtgcaggagcagccaggcctgcacccatagacatggtacagagaggagcagggaagcccgctgcctgcagacttcaggaggagagaggtaggggtggtgcaggggagagggccttaatgccttcagggaaaggagtcaaagaggaatacccaggagacaactagactttagaattcttggggccagaaacttgattccacctctagtgctttcttttagatttctttctctctttactttctttctttctttctctttctttctctctctctctctctctccctccctccctccctccctccctctctctctctctctctctctctctctctccctccctctctctccctctctctctctctctcctttctctctctctcttcttaagactgggtctcgcagttgggcacagtggctcatacctgtaatcccagcactttaggaggctgaggtgggtacatcacatgaggccaggagttcaagaccaggctgggcaacactgtgaaacccatctctactaaaaacacaaaaatttgccaggcatggtggcagatgcctgtaatcccagctactcaggaggctgaggcaggagaatcgcttgaacctggcaggtggaagttgcagtgagccgagattgcactactgcactctagcctgggtaacagaacaagactctatctcaaaaaaaaaataaataaataaaataaaagggataccgggtcttgctctgtgtcctaggctggagtaccatggtgtgatcatggctcactgcagcctccacctcccgggttcaagcaattctcctgtctcagcctcccaagtgagtacctgggaccacaggcatgtgccaccatgcctggctaatttttaaattttttgtagagatgaggtcttgatacgttgtccaggctggtcttgaactcctgggcccaagcagtcctcccactttggcctcctgaagtgctgggggtacaggcgtgagcctccacctggccagcctccagtgcttttgcatccttcctgttaacttgtgtaggaataaaacattgtcacaataagatttttttcctttttattgttttgattttttagccaatgagaaggaaaattccttattagggagggcgagggtgaggatatgtggggtggggagaagcgaacgttccaagtttcgaaaacagcgactctctcttggactctctagccagtagaaacctccctcccactctcttgccccaagatctggtgcttagaagagaatcaagggaagttggaacccagaagacggagacagattgagggactgctgtgaaatgttggggtgtttggtgaataatattagaagttgggctggcagagaccctgtcacataaacattaaatcaacactggagactgagcatttgttagaaatgtaagcgggaatggcagaaaacttgtttttaagggaaagcatgttacggcttatgttcagcctccatcctctgaaggcaaaagttagcaaagttgatgtatggcgttgctttttctgggaactttatctcgtttggtggggttcccatctctgtctcccaggagccaagactttcccctccctctgctccagcagaagccagtctcaggcaaggctccctgtacctcatttacactttggtgtgaatatgttattgtaacctctctcctggaggtgtctgcattccaagactgaacttttctgtgaaagttactgtcactgtgaaaggcagttcagcccccagggattgaaaaaggaaatcattttgggtaaggggacagttagtccagattttttcagttgcaagtaaacctaactcagccagtaggcaaagggggaaattgctggtttgaactggtgggaagaaagctgaggaaactcctacacttgggggaagaactgcaggtgcctggctgcagggaacgcagcgggggctcaggaccaggcagatgccctgcctctgcttcccttggcacagtggcctccttctcccttcaagtaggcagatgctgcctgtggcagaggacagcagctgattggcagcccagcagggaggatgtggtagacaggcactgagcatctcttctaccctccttctagagggctatcctgtactgttgaggctaaaagactgaaaaccacatttcccagcctctcttgcagctaccaatctggatgagagttagattctacacattagatgcactttagcaagattttcaaaagcagattggagaaggagcccatgcttctgctggttttttttgctggcaagtgaggggttctgtttttcctggagtgactttatcatggtggcatctgaaaaaggctatttcttgatcagagagacagcaaccctctcagtgacctagttctgtgggtgtgtctctcctgagagttaatcccagagctcaaactagagctcaaccctagagtctcttcaggcttcccaggggtgggggtgcatttaacagtccaagttaaagagaaaataaaggccattaaagaccaaacattgagcactgagtgaaaaagttttattgccaaacaggaaacctgattcaggccagggtcttggaaggttgttcaggatgagatgggggaggtgaaatggggtaggtctttgaaaaccaacagattgcaaattctctgtcccatagcaggaaaccacagtctctgatgtcagctggctgccaacacgtcagttgtatcagcattagctggctggaggtggcctgctgtgtgcagatggtacctggtgcaggattgtggtgtccaggtgtctctccttagcacataagaccctgtccgaggactgtggcatgacgtgctggagtcacgattctgtcacccagtcaggtcatcagtgtcagagagctaggtggccaggttggagttgattgccaatgataggtctttttctgcttaaatcagctggactggattctattgcattaacttgaccctgactcatgccgccaggcctaatttataaaccaagacaagaaagggctactccaccccctccaatttgtgtaaggccaggggacttcccccccactccccaacctgaggcatgcaccctcccttagatcaatggctgtttctctgagaatgcggaaccgtgattaatccagccttgatggggaggcagcaggaactgtaggcattctcacttcacacccatcccaatcccctcccccttgctgtcctcttgtacagaggactgaaagcacaacactctctccctccctcccttataggtggtgacgatcatgtgactctcttctggtcaatgagatgcagcagaaagtcctagggaggtctaggaaaagtcctgttgggagagagcattttttaccttctccctgctacttcttgctactagtaacatggatgtgagccttggaggggtagctaccatctggcacctggggtggcaagccaacatggaaaggatggcagagcgggaaggaggagccagccttaccgatggcatcactgtcactgcgctagccccagaccacctgctccagagttctggttatggtaatgaaataaaccttgatttttattccttaaaactacccttcaatgggttttctgttcattacagttgaatgctttcataactgatacaggagggaccctgtgattggcagttccactagactgcatggagatgggtggagttatctaaaagaacagagatagtgtccctagaagaaggggacaggaaagcatcctgggtacacaaaagtcaaggctccaggatctgccctgggggctatctcaacacccctacactctcaccgcacgtatttggtcagctatgaatatgaccaactctcgtcgtttatctctattcagtggaacacagcagcactgtgacctgcccacgagaagaaggatttttagaacttatcttagggcaattttaggtagaggagcagacaagatggtgtacaggagaaacaggtctattaaccctggtattaatattaactggctgcccagaataaatgaagaatagcttattctttgccaggttgaagatagaaaaggaatgaagggccggagaagtacagctgggtgaagcacagagcagcctagtgcttggcatgggactcagatctgaagcagcctctccgggacttctctgagcctgcccctggtggtatgactgtgatatccctgcttctatagttggcaaccaacatgtcctagctcctagaccatagagggccagattcatgtctcattgactgtgtaatctctgtgtggcccagtacagagcatgcacaccgtaggttctcacatatgtttgttgagtgaatgaatacaataccaaacgaatggacaggacagagctgtgggctagcaggaaggatatctggcttttgcttgaattagctagtgaattgctgtgtggcctccttactgagcctcatttccctctgtctgcagagtcaagcaaatcttccattttttgttcccctgctgccagagcatggcagagtaaatgtgtgagttgaagggagcaacctcatgaggttttgctttgtgtcttaattacagccatttgtggaattaggcttttaatataaatatttgtgtgcctgcgcctgcatatatgtatttggaccaatgctctcatgtgtgcaaatacatgtattctaaagaaatctgtccagaaccccagcatctgtggtgtctgtggtgggaggggcttccatattacagagagatgcccacagtgcatgacgttacccgcacaggtgtgacatcacagggtaaccaaatgcttttgccctgggggtgggagagggatgggtgcacggtgaacagcaggtgggggtctttccataggggatgaggaagacaaggccacttggaggcagaggagaccacagtggggcatgatggttggggaaggccttttacttctgccccttaaggatgccctggaattcaggctttcggatcccagagctctcattagagcagccctgcgttgtagacttttctgcagtgacagaaatgttctatatctgtgctatccaatatggtagccacaagttacatgtggctattgaacacttgaaatggggttagtgcaattgacgagctgaaaatgtagtttaaattcacttacatttaaatagctgtgtgtggcttgtggctgcctattggactgtgcagttctggagaatggtactttacttgtccttggggaagcagaaacaaatgaaaacgaggatctggagctcatgaagtttctcatggggtggggtatgtgtgttgaagctgcaccttcagcaggaacctggccagtccttagtggaggacatttctttccatcctgcatccagatggctggtcctgctcctcccagtccatggagaaaaaagaattgaacaaactgtctaagctgggtcaggtactctgcagatgtttgctgagtatcgttcttgatggaaatccccgtggaactcctacattttctcctctcttctccttcctttcagaacctcagagtgacagagccaaaagaccagtgcctcattttgctgacatggaaaaggaaacttcgtgggggaaagagatctgcttgcagtcggccagagagacagaaccagggcagtggtgagctctcatgacctggtgtctgttgccttctggttaagtttttcatttgtaattctacaaacatcccttctgtaaacatttccctcaaaatggagcaggaagctctcaaaaatggaccagaaaggggtcaggaatataactttctctgcccagattccaggacttacagtgagaaagcgccttctgggaacttcacaatggctaaagtgtgctaatgggatgatgtgcccttgtacacccactgcctctgaactctgctctgcattgctgagcaaactacatttcccagaactccttgttggattccttccaaacaggtttaccactgggagagcctgttggttggggagggcaggaagagggaggaaagaggaagggactcacttcctgtttccagctgaagtctaaatcaatccactatcaacaggtagctatcatactaccctcattgtcacccctcagaggtcccactgcagctgcataatgtcccctcagtggcctgaacatgagatgaacaacactcttcttgggagtaccagccttgcttggttcatggccacttttcctgattatcttgcagctatattaggtcatgtgacaaagttctggccagtggcaagggaacacaagtgataggtacagatagaagtgtctgatactacatagattatgcttgcactcactcttaagagagagacatgaacttttaccaacggaagccagtattattttgaacctctgttagagtggcttgaatctgtatcctaacttgtatccctaatgtgtgacccatgaaaattagccaggcagcaccagttccaaagaagctcacactcccctgcggctgcttctgccaaggtcactgatatttccctttgctaaatcttgtgggtgttttcttcagtccttgtcttaatcactcagtggcacttggcacttattccttcttgaaacccttgtttcccttggctttgtggcatcctgtgctcttggttttctcccatatctctgaccctctttccttagtcttttttcttcttcctcctgtcccttaaatgctggttgtgatcctctttttatctcattctacacactcacagcctgagtaattcacaccatcttgatgctgagaacttccaaaatgttggtctagcctgggtcattgttatgagctctagactcacaaggccaattgcttggtgggaacccctcccccatggttatctcatgggtccctgaagtccaacttctccttcattgaactcatcacctcttctgttcctcctcctgggttcccaggctcagtggtggcaccactgtctacctggctgcttagcctgagacctggctccgtcccaattcctctctctcagtcttatcatccccatccaggcaaatcattgattctgtggacctactctttcgggtgtccctcaaatctctccacgtctctgtgttctcactagcactaccttggtccaccctgccatctgctttcctcctccactcctgcattctgagtcattttcggcagcacacgcatccttaaaacccctccactggcttgccagtgtcctcaggattaggcgaaaagtctttgctttgttttacaaggcccttcgctatctggccccctcattacctcccttgctctgcatgctccagtcctgcagaactacacacagttcccccaacaaggccctgctctgttcttcccacacactgctcctctgcctgggccactcttcctgctccttgtcagcaggcttgctgctctcaggctcagcatggacagctgcttctgagagccttctctgcctacccaggctgggtggctgcctctctttggtgtgcccatggcagcccagaatgcctggtggacagggagccctcagcaggccgtactgcagcgccctgcccccgtcagcctccaggagcctggagtccagggacatcaagggcggtcctgtctttctcacccttgtctctccagcccctaacacaggggatgcctgaccccaaactagacgagttacttgacctctctgacccaagacaaaatgggaggaaagtgccaaatttccaagattggccaggggattaaataagataaatatgcaagtctcttatctgggggtctggcttggtaaatataaagttcttttttcttttcttcctttttcttttttttttttctttctttttgagacagggtcttactctgtcaccaaggctggagtgcagtggcatgatcatggctcaatgaaacatcgacttcctgggctcaggcgatcctcccacctcagccccctgagtctcttggactccaggcgtgcaccaccatgactggctaattttttgtatttttagtaaagacagggtttcgacatgttgcctaggctggtctcgaactcctaggctaaagtgatccacttgtctcagcctcccaaagtgctgggattatagacatgagccaccatgcccagctaaaagttcctttttaaaatctgcttgttagatacactcatagaaaggtaactggccacagaagggagaggaatggcagtccatccagggatcactggagtgtcatatgaaatgttataggaatcacaggccttagaacttgaaaggaacccaaggatcatctaggctactttatgcaggtaaaacagccacctgtgcccatcacatagctggggcacagctggagaccccaacagagaggagagctgatgggtgacgagaaatcaggcctctccgccacggcagcctagctaatgggtcttggctggaagctaacaggaaggcctctttccagaaacactgtaagccagtgtttctcagattgctgggtgtaattcataggcagatcatgaaatcagtttaatagctttgaccagcattaacctatttatgcctagcgttcccttattggaacactaagtctgtgagagttatttacatcctactgcttaaggtcatcgccaaaatctgattttttacacaaaaaatttgcaacctccagcataaatgggttaaaacaagacaaaacaaaacaataccagaatggaaaatagtgcatgatctgtacagtatagttgtagaaaacttcttgttttatcatttgatgtcatgaaagtccctgctgtagataaaagatggagcttgtgcttctgagtggtcatgctcaacagggtggggagcccaggggagtggggagtgatcgtatagacagaggtgggtggggccagtgtgagcctgatggtcaattacttctcatttctagggaaaattgaaggaaaagaaggagggggatgtggaggggagagaaggcctcagtagagtttgcactattattagggcaagtaagctgcttctgaaaagaaggggtttgcaaagccaacccaggcaaaagcaatctgctggaagaacttcatccccagctgacactgtgggaaggaccccatgcagaagcaatagggcagcctggtcccatatcctcatgaaatgcctcttataattgtgacatcttgcaattgtggaggactttacacttttcggagttcctagcccctcacttatttctcgtaagaccgctgggaggtggggggatggtatcatcatcccactttagagatgaggaaacaggatcagagtgagctaaatgactgccagatccaaaactagaattcagacctcctagtttctaagtggacgctctttctacaccaccataatgtgagtgttctgtgtttacagggtgtattcaagtccatgactgcccattagaatccccccaaaaaattccaggactggcctgagttgctccttagaccaatgaaatcagactcctgggagtacggcccgggcctcgggatcctttaaagctccatttggagagcctcgggcacagccaggttggatccatctcccagtcccccagccttggctcagcctggccaagctgcccaggaggtcccttggtgccctgggctctgtttcactgttgttttgtagagcaacttcccagtgatgctgccactgggccccatcctaacagtgaagtcccccgggccctcctgagaggaggtgtgaactggaagatggggaggcaggcggctctgacagacagaaagcaaacagctcagaggggtggcaggctgcattttattcatcgttaatttaaacacccttcaagtcctctcttggaatgctgctcagaaaaatagatgtattgtttgagaaaccctgcaggcttgtcccgcatgctctagccccctcctgagagaacagatagcataaaaaatgatttgtaaagcaagggggagcttccttagggaagaaggggaaggggaagagggtttggggccaggtccgagtgcagaaatcctcaatgcatgagactagcgtggaaggtgtagcaattgtgctctggggtgcctgaaagtgccagagctgcttcaggggcaagagtccaggccccaagtccatgctgatgagcccaccctgggggtcaggaatggcctcagcaggccctccctccctccctctccaccctacaaagtgaggagccttgagtcaccaccagcacattatacaacaatacaagaaccctgcaacagataaagccccagcgcctcttctggactcagatgccctaggctggctgtctggctgtgctttccagacagtgtgtatgtggaattgtgctttttgttttttaagaatgtaaaaagttacagtaagatcgaaccacagggcccgtcgctcctatggtctctgcctgactgggctgccgtctgcctcagttccccagaagcttctcctttggccatgagggctcagtcatccctcaccccagagtccacaggaagagggggtctgctgggaggcctgtctgaaggacggaggatcctgggtcaatttagcagctattttccagggtttggcttgggtttggatgctggcttctgtgtgaaacctgaatacatgcaaattgtacataaaactcccccaaggcagagagggattttccaggccctggtacatctctagagagttaaaaatgggaaatctttcttcttaaagtggcccagactgagacttttccttggggaaaagggttagtagctctttgtaaggctggtgtgtatgtgtgtgtgtatatatatatacatatatgcatgatgctgtgcaaatgcccagggctgtctggcattttccacaaaatgagagcctgagattgcctaagccttctgatgccttctccaggcctggaggcactgcttcattcagaggacacaaaggcctgaccacctggctttagcaagctaggacacccagggtggcttctttacctttctcctcagctctgagaaggctgctagccaagactctggattctctgtggccacagtcatatggtgagggcctcttggagttcattcaaactttaagggagccccacagcaccggcatgatgggtaagtccaggcctaaggttaggaagcaaatcctggagcatgaggaaattgtaggctacagtgagctaccagtggtgtgcaaactggagacccccaagacagtgagagaggccacagcatctgagggaatggagctctttcttggcctgaggttcagaagaacctgcaccaaagaaaggcatccctatcaatgtcactgttcctgaaatgatgggagaaccacatccctgcttcagggaagcagtccctgtcgtctggggcgctgagccctttggcctgagatgaaggatgatggtgtgatgtatcatggcagtgtgactgagactggattgggggatggggacaggggaacataggcaaaaatacacatgtgccactggatcctgagctgccattgtaccttggaggactggcgtttctctgggaagttgggaggtgggaagaggaagggtctcattttcctgccccttgaaaccatgcttaccattcctttagaagattgctcaagctgcctccaattgcctctttccaaaaccaaagcataggaaaacaagtaaaaacagctgaggctgcagcataagcaacttaggatagagtctaggaagcaccgccaacagagaagactgccaagaaacattttgagtttttcttctctggaggtgggtcctggttcctcccatggagaccacgattctgtgtagtcctgcacgctgggcgggggattgcctggaggtttctttagacctgtctagctcacacagtcttgatgcctgggttttaggctgctgtactgttgctggggctcacttcctgtgggtaggctgttattttgcccgcagatcaagtcctcactgtctagatgcctctatcatggggatctcttcttccctctctggatggctctgatccccaagttatttcctgttgcctaggtaacacctctaattggatgccttttaatcgttcccttttttaaagggataaatgtggattttatttccaggtcctgtcagagggccctgccctagagaacacgtgcgcccctgcgtgggcaatcccttcactgtgaccgcaaccatgggttggatggggggcactcactgggctggcctgacagtcacagtgaatcctgaaagcatggttttcacaggaacccaccttcaggatttagcaagactgacgtctctcctggccagcgctgcttcactggcttcaccccagattagggcctgtgtttaaaaaccaatcccaactcaaatcagaaattacccaaaatagctggagagtcactgagatctcaggtaagctttcccttcctgccatgaactagaaggggaaagaagagtttgacattcaagtttgactctaatgctgggtgcgtgagcgcatgcgtgcatgtttgtgtgtgtgtgtgttccacgcacatttgccagggagagagatttcacagcatggctccagctggaggcggtgaggcggtgcttttctaagacttcctatcagaagctgtgcatactggtgggtcacgccgtgcctgtataaactctggcacctgtccttgccctcatcatatatgagaaaaatgggcagagagagtgttcgtttacacccccagaccactatcctttcaatgaagcctgggtatctggccttcctccaggtcagggaccccctatgctgcagaaggcaagtctgggagaatctgtccctcagcccgagagcaaaactgtaatcctaacattacttccatccaccagtttcaccagctacctccctcctgccttcctctgcctccaataggctgtgcatggagaagacaaatcctcttgataaacaatatttagaaagggattctatctttcctgaccccaaacacatcatggcctctggagccaaataccctgacatttgcaagatggcttcttttgggttcctggtgctgcaggccctggttcccaaggacgcagctggcagaggtgcctccttcagaggaggaggaggagaagctggagggctgcgcccggcaaccccatgatctcttaaagggggaaaagttgaactgatcaacagtagttaagaaaaaaaaaatccacaccaacaaataaatatcttgtctgagaagactcagatattcctggttaatattgaaaagcactgctgtggatgagcttgtgaaagaaaggacggttgggggattcaagatctgccgatccgagcctggagatcagccagctaaaagcccagcagggctcctgcagcctcaccgctcccctcctcacaggtgccctggaccgcccaccattagaagtagctgccctgtgctctgtgctaaatggactaactctgagctgagaaaggccagctaagcccctcaccactgcaatttccaaatctgggggaaatgccacagtccgcaagttggtgctatgtttcatctcattgcataatactacaccattctctgtgtgtagtggctgttctatatatatacatcgggaggcaacatatggctgtcccaacccccacctgtcaaaactgtgactatatcacttctgacgaccagaaggaagctgctaggctgggccaggattctaaatgctgaggaggtaattcagagccacgaaaagttgcaccatatgctttggggttgccggctgcttctgtgcatggggacggggtttagtgccagtctgcaaaaccctcctcgctgcggtatgccctgggtgtgggcctggggggccacgttttctctccctgaaggagaatctgctgggggccacggttctccaagaggggactcacaaggaacacaggcgtccccaaaacctgcccttgataacatcaggcctggccaaatagtatttctttaaaaaaattttttttgtttcattttattggataaagattaagaaagcgccagcagtgactgagagaagcaaaccacgcccggcggccccgcggcctggagagggtccccggcgcgggcggacgggcggtctacctggaggcgctggtctcggccagccggttgttcatgatgcccagcgcgcccacgccgcccgagaagccgttctggcgcgtgttgacgcacacgctgcgcgggtagccgttggccgtctccgacagctgcttctgcagcagcgccagcgacaccttgttggaggccgtgaggtcgcgcatggagatgagctcgcccgagaggcggcggccctcggcgtcgctgtcgcgggccgcggggtcggcaccgagcgcggccaggcggcggcgcagccgggagcctggggtgatggcattgcgccgggccaggggcgcgccaggagccgggcagcagcgcgcgcagcagcggcagctcagcttgcgcagcatccagttgagcacctgcttgatgaggatggagatgacgttgaagagcgagtaaatgcagcacacgccgagcaggatgaagaggaagttgcccaggcggtagagcccctggttccggtaggcggcgtgctggctgctcaccaggtccccgaagccgatggtgctgaaggtgacgaagcagaagtagagcgagtccacgtagtcccagccctccacgctggtgtacatggccgaggcgcagcaggacagcagcacggcgaacaggcccaggatgagcagcacgtggtacaccgagggcttccagcccgccaggctgtcggcctccgagagcgcggagccgcggcggaaggtggcgggcagcaggccgctgcggcgcagctggcgctcccggcaggcgcgcatgatgaaggccagcagcgagatgatgcgctccaggaagaggttgaagaacaggatggtcccagcgcagccgaacagcccgtaggcgatgaggaaggccttcccgcccaccgtcgcgggggtggtcatgccgaaacctgtggagacagggcagggtcagcgcggtcctggccgcgcaggtggtcctcactgggcgagggtggggggtgtgggggcgggggcatgcaggtgcttgcgcggctcctatctcgagtggcaccactcaggtggaggaagaacagcacttagtcatttatctcccttggtggcacttaataggtttcctgatcttggcagcccctaaactgatggaggagacatggcccttcatcttggggacctataaacccaagtggttgggacaggtagtcactaggaaggacccatcatgacacaaaaaatagaaaccactgctgcacaggtgcaaaccactgagctacccacaaagccaacaagggacacctgctctcccactcctccaaatttttttttaaaaactgtcatctttattttagttcataaatacattaatatactagtctaggtgagttttgttgggtgaattacaaatatttacattagaaatcaaaaccaacatagatctcttcaaagatatctagcttcttatgtgcttgtgcactttttataccagtcttgttacttggaaactccactgcctacttgagaatggtgaaaaaagccaagtaatcttagtgctgtgactaattttcactttacaggcacttcgaaaaggcctttggtcaaacgatcatattttcttttttggggggataggttctttgtcacccaggctggatgcagtggtacaatcatagctcactgcagctttaaactcctgggctcaagtgatccttccacctcagcctcccaagtgataggactgcaggtgtatgccaccatgtccagtgaattctttgttattttttctaatggcagagaaaggaccatattttcttagtctgccaacatttcatgcctctggaattgggcctaaggccaagtgggtagtccgtcacttccctagttcttacagtgtgaatatggggtgacaagaaaatgtgcatttcaaatcaattcccagatgactccaaagtcttacatactagaatagcagacttttctgttcaaagggcagtttttaaagagttgtcatatgtgcccaattttttttcccaagtgtgccatagattttcggtccctccctgttattaaaaaaaaaatcagtttaccaactctgcctactaactaaaggaccccaaaattaagtgtcagtgctcaaaagtcaactgcagctcctcttctttcctcaagttatttggaattgtgagtgaatccgagccgaacaactgttgactacgagtttttctccaaaagcctggtttttaaatgtaacctgtagtacacctgggcagacagccttgttagggaagcattccatagggctttgccttaattgggattgttcactctgggaccaggtagagtgtaaccaggtagctagagttaatggtctctgaaaagagctttgtgaggctgacaaaaggattgcttgagagtagtccacccacacccttcagagactgagcatggctctgccattgggtgccggctccttctcaaccaaggatcaccatcagtcatccttgctcacacttgtggccaaagaaaggctctggcccagctgggtcctgtgctgctggtatatcaaattgctttgttctgggaggtctatacaactgcgtattgcttcaggcccttatcgttgttaacttaccacttgttcaaagcacaggctttaagggtgtctttatcaattgatttctgcagaaggtgtggctgcctgccagtgtgctcgcccatgccatccagggcagtgcagagtggcagctctgcctctcaactgagctccctgcccagtgctggctgtggtctgtgggacccgtggttgcctgactctggttatgggagggggtttcatctcttggtggaaagattcacttactgcttggagtctgagctgaaaaaatggatcatttgagcagcaccatgatactgttcagcaagtctggcagcgatcaggggcatccctgtttaatttgtgccctatggcagaagggctacctgtgctctgccagtggggtggggccagccctgggaaagtggagaagagtttgtcctatgtggcttactagtttcctaaacagactatagaaaatatttcttgtaatactttcagagtacattccttaagcctatgtgctaacaatcattttctagactgtctgaaggaaatgcccagttgcccgagtgtggtgttgatcttacgcttaatgactcaggtgaggggaaaatcttatgatgttacccatgttgaggaagatggattatgtccctagatttacagaaagtgaaaaaaaccaaaatagctgtgtaaccaagaacttgatagagggattttgctacattttaaagccacactcaagttcttgagtttataaagaaatcagctctgaatttacatggctataagtggagtgggagtatatgtgtatatttataaaacgttttagaccagtaacctaaatgtctaacaacacaactaaatgattgtctattcataaaaaggaaaactatacagcaattaaaaagcatgaaccatagctacttgaaacaacatggataaatctcacaaaaagaatgtggaacaaaataagctggacacaaaataatacattctgcattattccattaacataaaattcaaaatcaggccaaactacagccttttttagggatgcatgcatggttggtaaaattataagggaaagcaaggaagtaattttgataaaagtcagaattgggatttcctctagagcatggcagggggtagtagctgagaggggacataggggacctctggggtgctagaaatgtttttgttgacctgggtggtagttacatgtgtgttagctgtgtaataatctgttaaattgtatgttttgtgagtttttttgtactcatagtgagaaaaaaattttaaacttctagactgttagaactctcagatacccaattctgacgtacccatcactgtataggtgagggagtaggggctgaggggctgtgacctgcatgttggggacagactcccacctctttgtcctggcttcaagcctggtgcatagatcggtatacagaacactgcatctactcactgagggaacacaaagtctcttatagaaggataactctgttaaattcctaaggtaattgaaaatcctgggcctggaaaaccaatactttgtctaactaagaaaatactgaattggatttttcagctaaagcctcaaagctgagaacagtatgtgtacatttctccccattctaaagagaagttccagacacatccatgctggacttaataaaacagcaaaacaggtctggggctagcaaccccccacacccccacctccaggctgtacggaaaggctggggattgatgggatcttccatcagttgggaagttgttatgggtagttgttgtggcagtggagagtgctgtggattctttcactcacccccaggccaggggatggttggagcagggaaggtcaagaggacttatggagtgtcagcaagagcccggcagctcacttcctagctggctgggcacagccgctcacaggcctacccagagtggagcatggtgagggttctgggagaacccggcagtgtcccctggagtccagagctgtgctggagagttctctgggtgggaggctgactggggcagcccccacaggcaggggaggaagagggcagtcccaggggccatctgtacttcaagggcttgcttcatcaggagatgtgagggtgacatgggtcaccagagggtgacaagtggatactgaaaggaagagatctgaagagactgctcaagagggctgcctgctggagcaagggggccctaggaagaagaggctgaggggcagagggctggggacagcatgagagggagtcacaggaggagggatggagagggcagtgcccactcagggaatggggcagggagtggtccctgtgcagggctcccaaggacccataaatagatgccgtgaaagcacatatgcctgttctaacagggagccttgcagccccaccagcaaaagttaagaaggaatgatagtggctccagtgatgtaagatcacccccatgccccatccactgcgggtcccctgagccatgtgtcagcccagagctagagggggaggctaaataagctctgattagaagtgaatttgaagatttgattaaacaactgagaacgagtctcaatcttaaaactggtacttaattaacaacaacaacaacaacaaaagaggccgggcgtgatggctcatgcctgtaatcccagcactttgggaggccaaggtgggcaggtcacttgaggtcaggagttcaagaccagcctgaccaatatgcaaaaaccccgtctctcctaaaaatacaaaaaaaaaaaaaaaattagccaggtgtggcggcgggtgcctgtagtcccagctactcgggaggctgaggcaggagaatgccgtgaacccaggaggcggagcttgcagtgagccgagattgcgccactgcactccagcctgggcaacagagtgagactccctcagaaaaaaaaaaaaaaagagaaagaaagaaaagaaacaaagaaactggctgagcctggtggctcacgcctgtaatccccagcactttgggaggccaaggtgggtgcatcacttgaggccaggagttcaagaccagcctgggcaacttggcgaaactccgtttatactaaaaatacaaaaattagccgggcatagtggagtgcacttgtaatcccagctacttgggaggctaagccaggagaatcgcttgaatccgggaggcagaggttgcagtgagccaagatcgcgccactgccttccagcctgggcgacagagcgaaactccgtctcaaaaacaaacaaaaaccccaaaacacaaaaagacataaaaactatttggataactctagcatttacccaagatgttaaggaatctaaaagggagttcttaaagacaatagatgagacaaagccatttccagtgtcggcccatttaataaactggttccacctggattttctcttcattgtggtgaaagccaccacctaacaatgctggccctgcctgcatcatcgcatgtcatcatgacaacctatgggggagaacagctccattcaacagatgcagaaactgcaggttaaagggtgaaaagcagttgcgaagtccccacagcttggaaatggtggagccgagactgaaacccaggtgtgctagcatctaaagttcatgctctttccaccacattagactgtattctgagggcaccaaggaagctccatttttcttaagaaaccaaattgcagtcctccaggaccacagccaggggagcatcttcgtgggagagtggctgctgctcagagttgtgactcccatccttaagagtcctctgtcctctctggcctcctttctactgatcattgctgtccccttcacaggggagaggggccatggcctatcccctaaagagtctgccaaggtagactcataacctccccgtggcacagctcagacaagctgggctatttacataagacttgacccagggcttgaggacagcgcgaggaatgaggtgcagaggagactgctgcttctgggtgacagtctgcctggctgaccacagctggggtactcattggcctcttgaggccccccacaggcctgccctgcctgacctactcttgtgaggccaaggccatctcctccactctctgggggcctcttctgactcctccaaactcttccatgtctggactcctggcttctgcccaaggccatctattggagtttgggtttccagttgaggatctgcctttttcctggatgaccaaacctagaatgtgaccggcctcatgctccctcctcacaagggtgtggctttatccgagggcctcagcaaggcaaccaacaccagacatgaagctggtaagaccaacatccacctattcattccttcagcaaacatttactgtggacagcatcaggttggcagtatcatgcaaggctcagaaatatggtggaaaaccagacagatgcagttcctgtcctcagtctctaggctgccttcctagaggcccctcactgggtttcttagcagttttgtacagatcctaccccctttgctgccagcaggctcacctctgggacagggcgcatatagtctgggccagaacttgtcctggggtcttcttacggccctggttcagcttgcattcagcataacaacttagctagggagtgctgcaggccccaaatgatgctaaatactagactagctgtgtaacaccatctgcccagaatgaagggacaggtgaggcagaagggtctccgacagcgcacagggcaaccagtgaaagcgtccttactgtcctgttcctgaggtctctctgtgcctgctttactgcccttcgctttcctacagagcacactcagctcatcctgggagacaaggtgggggtggaggatggtccatccttcttccgcatcaaggtcagtaggttcagagctctgggggggtgctgagaccctgggacaggcttcctgctgagggcactggggcctatgcttgtgccactgcctagccagttgcctcccagagtagagaagcagtctcccaagctcttgcaatttgtggggagccaagctgctctggagaggggcctcaaagcttcagccagagaaaaggcaaacccagccaccctgagaatctcctcctccccctcaatcacaccctgcagaggcgtgatctgtccctgggttcgcaccaagcctgctattttgtttatgccacaattgatctgccatcccagtttgcaaagagcagacacttgggggctttattatgccactttgacaaaagctgtgaagctcgttcccacagcctgtctggtgccgccttcgcaaatggggccctggtgatggggccttcggagttcagctcagagagcatggaagtgagatggagaggccagcactgatctgtatcgtgcagccctgggcggcagcctcggttgggcccttgacacactcctcccatccaggcccccagccaccctgtgagggaggcactattacgcccaaaaatgcaggcaaggaaatgggctgagggaggggaagcattcactgaagttagtttgtacgtggctgagctggccctgaagcccatgccctttccacttgccagacagatgggaagtcttgactcattacccgctggagacttttcctgctgggctctgcactgtcaactgtgagagagggaaataaaacgtactgtacagtccaatctgggatacttctgagagtgaaagtggctctactagtaattaccccaggacagcatgtataaaccagggctgttccaagcaactgggacacatgattaaaatgcagattccatggcaggtcccgctcagaggtttatttagtgggtcagaaaatgggcccaggaatttcattttaacaaatgtctccagataaatctgatgtaaatggaatattcctttaagaatgccattcctttaagaaataatgttaataaggtattccagatgaccctattggttggaatctgtccaactacaaatattttgatttaaatttccattgacctaaaatttttgtggtgggcactgcagctctctccttaccaatcattctcccagcctgtactatattgagtagcagccaggctacttggagaacagactgaactccaggaatgggctctattagtctaggccaatcaggataatccagttccttaccatgactggctcaagaatgggtagacctaagtcaatcagtgcagagcattttcatgactacagagaaaccatgggaaggctgaggcgtggactcagtgggcagggatggaaaaagactcagaaatactgggcatggcccatggctcattagggttgccaggtaaaatacagaacacccagttaaatatgacttgggtaaacaagaaatcattttttaagtataagtatgtcccaaatattgcataggacatacttatactaaaatatagttgattatctgaaattcaaatttcactgggcatgctgtctttttatttcctaaacctggcaaccctactcatgactccacttgtcagcttggtacactcctctgagaagcttctcccaatattcccatctcatttgatccttcctgactggccagtgttgggattaagagcctcactttaatcaaggaacccaaggctcacacaaggctgagccctgcccagccaggccagcggccaggcctccccatgtccctctctctcctaacagggaggagtgggagatgggggagggctgtgggatggagggcggggctgccaacagcctgctccgtggctggaactgcgacatcgcctctctgggagtaggagtgggcttctggccagactcagtgggggaggactggacacttgagagggcactgggccaaagacttccctgggacatgtgccccagccctggtacctcagggctgcacatgtcagccatctccatgtcacacccccggggaggacaaccgaccaccgtggacaagccctgaaccttttgggaaagctggtgctaaaagaatagctggagaagtcactactgaggactgaaaatgcggagggtataataactgctgttgtgtatcgagcctcactatttccacgcaccgtgccaagtgctgcacgcgtatcaattcatttaatcctcacaacaactgcatgaggctccatgttttcactgattccaagtcacagcttttttcctctcatgttaacatctctaaaatcgtgcatcttacagtcaatggcctgatagtttatttggcagtattttaaattcctaatggtacgtaccatgatggtgtgttcataaccaatagtgtcttagatttgatgaactatagtggggatgattattgtccccagttgtgagattagtaaactgagttgcatttaacagataaagacattgaagttcagtaacttgcccaagatcacaaagcaagcacatggcagagatttgaaactagaggaaggagcttgcaatgtgataaagcagcaaatgtacaagagtttggaagaaggagaggtaggttgcttttggcaagagcagcaattctcaattctggctgcacaatagaatcacctggggaactgaaaataatccccaatccccgggtgcatccagaccagtttaggtcaacatcagaactgaggccttcctggtggaatgattaggaaagacatatggaagaagagatatttgtgttcagtcttaacaactgggtggggccgggcacggtggctcacacctgtaatcccagcactttaggaggctgaggcggttggatcgcttgagcccaggagttcaagaccagcctgggcaacatagtgggaccccatttctacaaaaaatttgaaaatcagctgggcgtggtggcgtgtgcctgtggtcctagctactcaggaggctgaagtgagaggatggcttgagccctggaggtcaaggctgcagtgagccatgactgcacccttgcactccagcctgggtgacagagcaagaccctgtttaaaaaaaaaaaaaagattaggtgggatttcaagagattgacagggagcagaggcctaggcttgggaaaggcatcccctgctgggacagtgcagtgcccagggccactgggcagggtgagggggttcagcctgctggtgaagcctggcccataggaaacgtccagtgactctggctgatggagcaggggaatctgtggaagaaggcaagggacaatgctggtgaggcaggagaagagggaattggggtaaccaaaggttaaggcgtaaaaacagtgggtgcagccagttctaggcaagattaggcagcacataggccacatcctcactcctgtgataagacagaagtttccacttcagcctctgattgattgtgggccaagctgtcacttcagcctctgattggtcacaggccagtccttcatggggtgtaactaaccctaggcctctaaagggcacctaggggtgctagcaaattcttttagctttataaaaaccctggggagaggcagaggttgcagtgagctgagatcatgtcactgcactccagcctgggtgacaaagcgcgactccgtctcaaaaaaaacccccaaaaacaaaaaacaatattcattcattcaacaaacatttatttgcacacggtgtagcaggctgtcataggcattagggatacagctttaaacaaaacagacaacattgactatcctggagcacacattctagtaacaataagcaaacaaacaaatttgtaaatagcataaaaaaaaaaaaccctggggagcactgcagtagagaggctcttgggccacctgcttgagtctgctcccactttgtggaatgtacttttgcctcaataaatctgtgcttttattactgcttttttctttttctttttttaaagtttattctttgagacaggatcttgctctgtcacccaggctggagtgcagtggtatgatcttagttcactgcaacctctgccccctgggctcaagtgatcctcctgcctcagcctccagagtagctgggactacaggcacccaccaccacacctggcaaccgttcttttgttgctttgtctttcattgctttattcttttgttgctttgtaagggtttttctattctttgtttaacgtgccaagaacctggacaactcacagtcaaggcgttccatctggtaacattgggagcacctcctagccacctgggactcaggttgaccctacaggagctttgtgaagtgagcattgcctggcacttttaggtgccagcatccaagcctagcacctggcattgtgccctgctctgtagaaacttctaggatctggtaagcctcatgttcagaagacaaactcagcaagtcttaactcctgcaggcttgggaagggcctccctcggagagctgagagcagaactaggaacagggacggtggtttcaggctctggcgcctccacctgctaaggaggtgacatggacacattccttaccttctcggaccctcgcttctccctctaaaaatggcccaatgccctacttatttatttattttttatttttttgagacaggctcactctgtcgcccaggctggagtgcagtggtgtgatcttggctcactgcaacctccacctcccaggttcaagccattctcctgccacagcctcccaagtagctgggactacaggtgcgtgccaccacatctggctaatttttgtatttttagtagagacggggttttaccatgttggccaggctggtctccaactcctgacctcaggtgatctgcccaccttggcctcccaaagtgctgggattacatgagtgcgccactgtgcccggcccactgccctacctctgaatgtcactgtgaagattaaatgaggatgtagttcccacatgcatcccacagtgcccgggacatagtaagctccccaaaagcaccaagcttagctgggaagcacgatgggtgaggcatggaccttatttcacagcaaagtggctcaggtgaggcaggcaaggaatgggcaaatcacgacatgacatatggatttccatggcagggaaatgcccccgtaggcacagtcaagcctggctctaccattggctcgccgttctcctacctcgctgggcctccatctccccacctctggctcacttcctgctttggcccctacgctgggtaggaggcccggctagaggttaggcaccatcttttccagtccccaaagtgagagtgtgtgtgtgtgggagagatatttttaaatggggctgttgtggaaaagctgagaccgtgggctgctctatttgttggcgcttgctggtttgtctgatttgcagagctggatggactgctccctgaggacagaagctcttggttttcttccctccgaagccaggcgtggggtgggagcatccagtgcacccctcttgcattgggtgcgcagtgatccggacagagaggctccagtcagccaggcacagagaaaatggccctctgcccctgttctgcttgtttttgtcttgttctctgggggcctttgaggtgactttcttcatttgatgacaacaagatgggaggcggggacagctgaggtggcaggagtaggggagctagggacagaggatgaaccccacaggctcaggccagtgacttctaacattagagaggttttggttaactgggagcaaatgcaagtgacttctttgaatcgactttgtacctcggcacagccttccttgctagcagggctgacttcaaccaccccccactctgtgctttatctctgggattaaggttttctctcctcaccagaaatcattcagcaaaatgagttattaaaagccggttaaccactcctgcctccgggtagctcccgtttaacaacctctcctggggagcagctgtcaagctcggccctgagctggcgggaagatgactcatttacatacagcccgtctccaggccccccccaccgccaccccaagatctgtccctgtctccctgatgactaatcctttccagggatgagatcactgccccttctaacccccccccccgcccccacacacagaaagagcagagccctcatctcagcccagaattttgggagaagactaaatccaagaccaagggaggcctttgatgggacaaagacgtgactgatgaacccggagtgaggagcaatgagatgaagaaagctctgcccacctaccccgtccctcactcctccctcccacctcagggcgctcatgtggggcttgtgtggggaacagctccagggtcataccacctctcagaagggagacagaccagccaggcgtgaggtgacagaccagcgggcagctcagagcagcaagacaatgtcaattcaatcactttacctcaattcctctatcacacaggaggagattttaaaaggaagtctctggtggtttgtaaagcaacaaatcctgctctcaagtggatagttccaagccctctcaatgaattcagttttatacacctggagaagcacagcctcgtcctttccatggagctacaagccacatctgggggcgctcagtgcccaggctgagggggcacgcagagccctcggggacgactcaatgcacagaggccactccttaagggcccggctccctcaaactgaggtgtccccatgcttggtcttcccacagaagccagcctggttggctgcttcaaaggaggaataaagatgaggagccatgatgcaaacaaacccacacctttcagctgcagccagggaggtgctctagaggcccacggagagctgtgtgtctgctctgctagcccgacctgcacctgccctatgggctggtaaaggggctgcccacagcacctcagcacatgggtctctctctcttttcatccagcccaaaatgtcaaagcacaagggtctctgtcagggcctggctgtggtcactggactgcggctgaggggtaaggtgcacccctcctctaatgggggcgcacccctcctctaatgggggtggggctggagctaatggcacattccactctcagctgccacacacagatggggaggttgatggcccgcacacaggaagtgagggatggtggggactgaatttatggagcccctatcccagaccaagcactctgctggtactttcacaggtgtaatccccagagcagctcctgggggaggtgtcattatgccggtgaggaaaccaaggctcagagaagtaaggcagcacaggtcccagccccactccacctcttgaggcctgactcagccttaggttcagagaatgcaactgtgatttttccctgagatgagcattcaatcatactgcgccagggtacttgctgtggccaaaacgcctgccctggatctgtggcatgactttgtgtcagaccctgtgcgatagaaggagatggaagctgaggttcagagacgttaatgaccttgaaggtcagggtcacagaaaatggcacaaccgggattgcaactcagttctgcccaatttcaaatctaccttcctgccacctccttgccttgcctattgtccccctcccttcatatgacctgggacccagactccctggttttctggaaatattctctctccttttggctcattctgtgcactgtcccagttggtggtattgaggcacagctctgcccagatcactctccagctcagctgccctgagctccccagccccacctttcaaggtcaggaatgacttatttccttttctcttcgcctgtctgaatcctcgccatcatctgacagcactttcagctcaccaggcatttaactgtgtgctgtcttgtgacagcccctgtcctgaccattgtcccagagatttaaccctttgtgtttttctatgttagcttgccagtgaggacatggcccatgtcttggacttcttgccaccctccagaatgcaggtcctcagggagcagctgctaaattcccaacagaactgacagtttgtccagtgatcaccagcagacactgtaccagaaacattgtctccatcttagtttcagttaactcaacatgtttttgagacctgctgtgtgccagacatgagggcaggggaaggaagactatggtgaataagattgcccacagacctccaggaacacacctgtagtcaaaacacaattgagcttactggctcactgcaatgaggaagcttggccaccatggattctggggcatctcagtcagagggtatcaaagagggctaattctaggagttgggcttgagttcttgagttaggtgatttatggaggacttaaggaagcaggcttcgctctggatgggatgctgccaaagagcggaagtacttctatgactgggcatcttaattcttagctggaagatgggaacgacatagcgaggccaagctgtgattggccaagaagcagcagttgctcatactaaccagatgagggatgtttggtctttttagtggtttggacgatgttcttgttttggtctgtgtttggacatgattatggggtgaatggtcttgtttttctctcactccatcttggtcataaggcggccttgcctgatcaggggttctgtgaaatgcttatgctccatggcagatcctcccagccccactgtgagtgccaggccagctctcggcgctcaggggctgccttcatctttctcaaaatgctgctgtgctttgcagcccataatagcattttactggatgccattcattattttttgtaaatgaaattctttccaagtgttccaatttacttggctatatatgtgcatgtgtgcacacacgcgtacttaattccgtacatggagcacactgctcagttgtgaaaatgggtgattttctttcttttttttttttgagatggcatcttgctctgtcgcccaggctggagtgcactggcgcgatctcagctctctgcaacctccgcctcccgggttcaagtgattctcctgcctcagcctcctgagtagctgggattacaggcgcccaccacgacgcccagctaatttttatatttttaatagagacagggtttcatcatgttggccaggatggtctcaatctcttgacctcgtgatccgcccgcctcggtctcccaaagtgctgggattacaggcgtgagccaccgcgcccagctgtgattttcattttaagtttcttctatttgcttttataaatatttcacattttctgtggtgcaaataggatagttgctacttttgaaaccgtaagttcactcccaacaagcactgttaagtttataaataaaaatgaataagatatgatccctgtcctcatacataatgaccacaatgccctatgaaaatgacagtaagggagatgtcaggggattccgggaagcaagagaagcggtttgggagggtgccccagagcaggtgccattggaactgagtagtgaagatgccttagccaggagatggaggcagttgggcacaaggtctgcaaggtccaggttggcattcaagggttcaggtgtcatgtggataagactttccagggagcacgtgtggtatgagaatgaaggcccctgaggaacttcagtatctaaagggcagaagaggagtctatgaaggagaccacattcattcaacaaacatttattgagggcctactgtggccaggaactgtgctaggcccttgggattcaacagtgatctaaaagacaaagtcccctaccctcaagaagcttacatttcagtatgggagatggaataataaactacaaacaattacgtggcctgtgagaaagtggcaagtactacaaaaaataaaaaatagagcaggctaagagggtgaggagtgtgcgggcagggaggaggcaggtcatggttttaagtggggtgggtccagggaggcctcgttaaggaacggatgtttgataaaggactagggtaagagtgtttcaggctagtcaacagcacgagcaaaggccctgaggcagaggggctggaaacagagaagaaaagagtgaaaaaggactgggcatggtggctcatgtctgtaatcccagcactttgggaggctgagacaggtggatcacttgaggtcaggagtttgagaccagcctggccaacatggtgaaaccccgtctctactaaaaatacaaaaattagccaggcatggtggtgcatgcctgtaatcccagttacttggaaggctgaggcaggagaatcatttgaacccaggaggcagaggctgcagtgagcctagactgcaccactgcactctagcctgggtgacagagaaaacaatggacaaagagattagccagcaaatccctcctgcacactttcagggcaaagtttaggtgatataaatgtccctgaaatgagaaaaaccatgactttcatttgattttaatgtgagggagaaacataaactagtagttttacaaaaagaaaaagaaatataatattcaagtagatttcaagcaacagcagatatgctgaatttatttgataactgtcttctttttctctgtcagcagagtctcatgcaattttaaaaggaaattcgatgaaacgaacacccatcaacatctttaatagctgcaagcaatgtggagcaaattttttgtcttatttaatgtggtcatcaccataacccagtaaagacaatatcatcattgctcccattttgtagacagggaaactgaatccaggataaataatgtagcttgcatgacaccaatcttcctcaagtctgagccagaatttatatctcccatttctcaacctcatctctcaagcctataatctttcagttataagaagggaaacacttgagggtgtatcagtttgtgttttgttcatagtgtttatatgctctcaatcaaggactgtttattaaaaaattttaggaggtggtagtcaaaaagtgtctctggctgcagtactggggacagactgcaggggtgagttcagcgagtctagttcagaggctgtggatcaaacaggtggggtggcccagaccaggagagtagccaaaaggggactaaggaagggaggccaaagggaggccacaaacgcaggagaggatgaaggtgctgaagctagaggccattcaggaaggaaggaatgacggggcaaggggtcagaaatttctagaagaatctagtaagatggaaacctaacagtcctactgggatttggcaactgggaggaagctggctctgtgcaggaaagaagggggcaccgctgtgcggacgccagactgcgaagggctgcagaaggagccgaaaggggaagaaacggacgcaggtaggggtggctgctgttaaagccgcttcccggggaggccaaggacatccacagctgaagtgctcaggaccatccacagctgaagtgctcagacactgcgttttctttatctcagagaggctgtgtgacttgcccacgtatgagtacagtggctaaatcacaagccctggagtcaagggtttaggttgatccagcccccactactcactggtggctgtcagcaagctactcgctgtgcctcagtttccccatctatcaagtagacagcactgccttacagatggttgtggggatcagaggggaggggacagctggcggatttagcagagtacgtggcacagaggaaacactaaatatgcttcttcagctccttatcaaggttaggcctccacaaagggtggagcagggaagagaaggcctcaccgggcagacctatcttggagaagatacaagcaatggtgctgaagtttcacaacagtgtcaaccccctccctcatgtgtgtactcacagctactcactttcctactctgtgccagccatgaggtgtagtcactgtgccagggggctgagtgtccggcctgggacgtgagagggcatgggctcacctgctcagggtttgaatgagaccccggtaaccgcagcagtaaagacccctcaaatgccatctctaaattaaaatgggtgatcagaaaatagcaggtgaacgatagtgccctcactgcccacagaagtgccttcagtcagatttagcgctccatcttctgcctttctgaagggacagtggaagcatccatttgaagactcttcctgtgtcttctgcaaaaccaaagaaaagccatcactgccgatgtctctctttaaagatctgttaggctaggcacggtggcttatgcctgtcatgccagcactttgggaggccaaggcagggggattgcttgaggccaggagtttgggaccagcctgggcaacatggtgagactccatccctagaaacaattaaaaacaaacaaacaaacaaacaaacaaaagcaagctgggcatggtggctcacacctgtagttccagctactcaggaggctgaggcaggattgtttgagcccaggaggtcaaggctggagtgagctgtgattctaccactgcactccagcctgggcaacagagtgagaccctgtctctacataaatcagtaagatccatctgtgcaattccttcctcctagaattcagaatctgaggtgctggtttcctgaggacacttgtgacttgctgccttttattgaactctgagtgccctattgcccagtttgagtgttccaatgggaagtgcagagccaccgtggccattcattgctgtagagctgcgccccagtacctgatacatccctcacccttttccaattgatttttagcttccttcatccctccctctttcccttgtcctcttcgtgtccacaggaagcctgttgggagcctgctatggcaagtgctgtgctaggacacggtcctgcactcttagagtttgtggttcagttattccagtttcagcacttacattcattcaaatgctttgtggaagcaagctggcttttagtcaccagcaatagcaatttctgaaaatcaccaagccacaccaaatatatgaaatatctttctctaaggtggtctttaaaatttgggctgactctcctccctctaggaatgttctgatgagtttcagtctgaaggcagggagatggtctcggtgacctcctgggcccctgttctgcactgaactgtatgcccatacattcataggttgagatcgtaacactccagtacctcagaatgttactgcattggtagaaaggctttttaaaaaagggaatcaaggtaaaacgaggccattagggtgagccctaatccaatatggctggtgtcctcacaggaagagtgtattaagatacagacatacacaaggaaaaccacgtgaagatatggagaaggtggttgtctgcaagccaaggagagagtcctcaggagaaaccaaccctgccagccccttgatcttagacttctggcctccagaattgtgagaaaatacatttccattgtttaagtcccccagtccgtggtactttgttatggcagccggaaggagactggggccgcctgtttgcttggctgcagaagccccacgtggctgcaccctggctcattctgttttctgtagcagcagcagcagcagcagcggcagcagggagcccaggatgcaaagcttggtttctgagccctgatcaggaggctgtgtttatatttatcctgctaactgcaggggactgtttattcccagagaaataacctcctgggcaggataggggcagccaaggaaccagctgcttccatcaggcctgctgggctcctccaggttctcatcataccacttctgtcgaggctctctctgacgcagctctcctcactccacaccaggcttgggcccaggggcacagcctggtcttcctgaggatgctcagacgcagggaccgactgctcctcacaagcaccctggcacatgcacagcccagggactggagccttcgcaaacaagtcacagtcctagtctgagattcagtgcaacactaggcgcttagtagatgctcagtaaacagaacaacaaggattttcttttttagttttaaaacattagtctacccatgccttgataaactgtaaaatgcctctgccacccattctcccttcttgctccctttcatgggagctctgaggggaaggtctctggggtgggttccagcaaccctgggcctgttctggggtcctgcagccaggttgggctttcaggagcctatatttcatctgggccccagtcacactacatagatttttgttttatcacagaaatcactgccacactgtgacccttaaggtcctcagcagggatggcgcgaggtgagagtatcaaagccaggtgagagcactcagatggcttctgcctttgaacgtgtgagaagctcactcatgcacagcgacaagcaagaaagacatgggaaactgacaggttttcatcactggctagtgaaaacacattttatacttctgggccaacaaatacttgggtcaattcacacattggcttgagaatgagttctttttctttttctttatttatttagagatggggtctcactgtgttgccaagcctggagtgcagtggctactcacaggcacaatcataacgcgctacagcctcaaacctctgagctcaagagatcctcccacctcagcctccgagtagctgggactgtaggtgtgcactactgtgcttggccaacgtgttcttttttgaggtgggaactttaatttacttgagcagatgtatcaacgtagctgtgaataaggagctaccagggcattagactgcagactctgacacaaccaccgtcaccacaataaatagcaacaaccaccaccacaacaagcacagacacctacatttttttttttttttttagctttgattactacactgtgttgctttcctcactgaggcttatgtggggttttctggttttaggaatcattttcacacacggtttatttacatttcttcacaaccacctagtgaggtaagcattatcctcggtttttagatgcacaatctgaggctcagaaaagtgcagtgtgaggtcactttgtgaataagtcatagaggtaatgtcagaatttgggtcagagactccacaagggctgaccctccttgcggttctctgaagacactgtagaaacccgtgggaagctctgctgtattgctgggtgctcctgttctgtggcaagacaacctagaaggtgatagggggtcttctccgagacatgtgctctgctggctctttggcagaaagggcagagtcggggatcaggacggtcatgcaggctggcactgcccaggggctgatcttccaggagctgggctagcaagctcgggatgggggatgggtcattccctccttctccccactgtcactataattctggagatctgtaaaaggatgtttaacatgtttaaagtctttgtttcccatccttctgccaaggattgagacatcgcccacccagcttcaatcctcatagctacttctgccactgatgggaggaggattgaggttctttctaccaaggagccaggaggatggctgtcactgctcctggaagcagggactcccagatgtggggataagtacgcagggcctgccttccctccactcttggtggcttccaaaggccaacattctagaaagccaaccacccatgtctcctctctttctattggagtgactctgctgcttcaacagagtattaaaaacaaagacagccttccaccctgacgtcagacacacagacacacgagcacgagcatcttgtactaccctgtgcccccattccccatcagcatacacgtggtgtttcggggataaagctacaccaaaggaaccctcccatacaggcttggtacagtctcagcctgtaacgcttccctttcgaagagctgtccctccagcaaggcctcataacccagggaacccctggcatctctgccgagggcataaaccatattagctctgaatcataaagaatgtttactgagaaccacatttgggaagacctttctctttcaaaccctttcttcccaggcccccagtgatggctaacaccattgttcgcagcgttcctactgaaacacattggtcgtgtgtactttcttgtctaactcatagattgcaaaagctataatttcatgggatttgttttaagcgcccttttctggcagatgtaggctcagtatgagcactctgtaattttccagcctcctaaatggccccctggcagcttacataccacatggtgtaacccacccttttcctatcctgcagacaacccaattactcacacagtcttcaccagggccctcctaggtgggtcccccaggctaggtcctgtgggggatgcagttgcacttataacaaaccatggcacatcctttctgaggaatactatgcatccaacaagagggatgcttagaaagttgattctgacatcacataccaatacacaaaaacaaaacccaaaattcatccagaaaatagactcaaggacaaaaaaatccctggagtactattttagtggtgaagctaaaggctttttttccctgtcactttttttgagcttctctctttttcaaatgttctataagaagtatctgttattcgagtgaattaaagaccactcgttttgtcattatttttaaaggcagagtctcaccgtctgggtggggagggaagtcatacacaagagaggagatggcaaggtgctaggaggttagatcatcactggcagaaggcaaatgaaggaggaggctccatgaagcctggatgatgaaggtgggctctgaagagggagtgggccttagatacatgaagggtaaaggacaggcagggatgctccaggcagggagaatgctatgaatgaagactggagggacagttcagggtcttgctgactagtttggctggaggaaaggctgcagtgagggtagcattagccacacttgggcttggaaaggctggggaccactgaaatgcaaagtagcttcccctgaaagaaaccagggaggctgctgtcagagagtggaccctttgggaagcctggatacagatggatgtcttttcccaattcagtcatttataagtagctcatatgtctctcaattcctcatcattttcgcagcaccaactttgtgggggagtagggggactagctgtggagtcagggacacctgggctagaatctcagctctgtcacttgctggctctttgatctgagaaagccattgagcctctttttgcctcaatttcctcatctgtaaatgagatgtgagctgtgctcacctccacaggatgctgatgaggattaaatgagaagaagtgtgtaaaatgctcagcatagtgctaatagcatgaccacctcaaaatgcaagccatttgtgctaactgatggacagcaaggaacagaatttctaaagagagtagataagaaaaaaatagagaagaggaggtcatggaatataaagccgagactgaattgcacttaacttcttttttttttttttctcaaataatttgctcagggctggggcagccagtatcatctacatgctctctccctcagggaggaacccatccaacactaaacttccagagaaagaggcaactatggacagggaaaagctgtaaatgaagcaagtgtcataagttcttcagtaacaccctctctcttattcaaaaacttccagtggcttcctagggtctagaactgtgagtcccaatgatcaggcttggaatcctttgggaactctgcagttattgcaaaggcatatcaatctacttggtcaccaattgttgtttgcaaccttaactttctcctacatggttatgctattactttccaaaaatatgtaaatggttttctgatgaagatgcacttaaaagtgctactgaattaattcagaggactttgtgtgtcaatatgcattttccctattaattaacggatactgaaagtacatgtaacttccatcatacaggtgctgtgaaactattcctcgcatttaaagcgattctcatgtttaaaaagttggaagcagcctaagcaaaatggcaaagccccatctctacaaaaactacaaaaattagacaggtgtggtagcgagcacctatagtcccagatactggggaggctgaggtgggaggatcttttgagccagggaggttgaggctgcagtaagctgtgatcatgccactgcactccagcctgggtgacagagagagactctcagtgtcaaaaaaatagttgggagacttctggttcaagatgattatttaattacctcaatttacctactctccctcttaagatcctatttaaatgatggtaaaaggacataaaggtgtaaactagcaataacacagggaatgggcagagggtttacagtggaagggcccgagaagtttcaacatgcttgtgcaagatggacagcttgagagagctgtaactgatgaaggcaggtggagaaacccacagctcagagggagtacagctgagaaggggagggagggaggggaactgccctgaagaaccctggagagacttgggtgtgggaaaggccatatagataatgggtagctgcccaccctctgccccaaaaagaaagcccgcagtccacaagccccacctatgcacactgagtttccagtccaattttctatttttaattcttaaatgtgagtggacagccacagttcagacatttgaggaaagcctgtaagccctctcttgcagctcctcctagcttagcctccttcatcttcaagggcactgcggctcaatcttcagatctcttcttttctggctcccacgaacacgccctgggactctgtggttctaaccttgacagcaactgaaattactctcatgaggagttttacaaaatgctaattcataagcccccacttccagagagaatgatacagttggttagggcacaacctgggcatcaaggcttaaaaactcccaggtaattttaatatgcagccagggttgagaaccactctcctaggtgatcttttctttttctttttgcgtctgggtctggctctattgcccaggctggagtgcaatggcacgatcatagctcactgcatccttgaattcctggcctcaagtgatcctcccacctcagcttccagagccccctagctgacattggcagggctttatttatttatttatttacttttgagatggagtctcattctgtcacccaggctggagtgcagtaccatgatcttgactcacagcaacctctgcctccctgtttcaagcgagtctcctgcctcagcctcccaaatagctgggattagaggcatctgccaccatacttggcgaatttttatatttttagtagagagggggtttcaccgtgttggccaggctggtctcgaactcctaccacatataagtggttctcactcctggctacatattagagttgatatggtttggatttgtgtccctgcccaaatctcatgttgaattataatccccaatgttggaggaggggcgtggtgggaagtgattggaacatgggggtggatttcccccttgccgttctcatgatagtaagttctcatgagatctggttgtttaaaagtgtgtagcaccttcccctttgctctcttcctcctgctccagccatgaaggacgtgtctgcttcctctttgccttctgacatgattgtaagttccctgaggcctctcctgccaagcttcctgtagcttgcagaaccgtaagccaattaatcttcttttctttataaattacccactctcaggtatcttcttcagtgatgataacattgctttagccagggttaagaaccagtggtctataggctggcaaatcccaaatttgtatctcaaacccaacctgtcccttgagttctagactggcctatccactatctaactggcacccggcttggaagtggaaaagtcatttcagaattaacatttccaaaaccaagctcttgattctccctcccaaccagcccctccttgattccacttcagccttccctatctcagtaaatggcaaatccatccttgcagttgctaagggcaaaagtcttagagcccttttttattcttttgctttctctcacaccctacatctgatccaggaacaaatcgtgccaccctactgtcaacacttatccagattctacacactgactttcgcttcaggccacgagggcgtagctgaatccagacttccctcccaccataatcaaccaggaaaccggaaaaagtctatgagataattattttcagacattggaaaaaaggtagttcaggattatggtccctgagagaagggaaacaaacaaggtgagcccttcaaaagccctggtttttgcctggtggcagctttcagacagccatgggagtggagagatccagacagagcccagaactcttgctgaattgaggggagagaaattcaggttcagggaggataaagcagctgtcactgcttaactgctgtaactactgtggagcactggagaggaaggaaccatcaagaaaaaggactccagaaatctactaggggtccctctttgttactcgcaaaggtctgaataacaatctgtgcaggtacagggtaaaacctagaaaaaaataagaccaaggaaaacaacttccaggaaatcacaatttccagagagctgtaaaccaaacaatttccagagccctcacaaagccaggaatcacctgagttcctatcagtcaaaggaggaaaggtttcactgaatccacaaggcattcagtagagaccccaaaaaggttattctttaatagtgtggctcatctagtcccagagaaaagactcctttagacctgcctttaaaaagcttaaaaacaagtctggaaaatatcaactgatctataaagaactgtctggcagaacaaagtccaaccctgcttgaaagagtacaaaacaatcaagcatcaacaatgtaaaattcatgatgttctgatctctaataaaaaatcagatatgcaaagaagcaggaagatgtgacccagaaataagagaaaaatagtcaatagaaacagacccagaaatgccagagattatggaattagcaaaggcatttaaatacctgttaaaatatgtaaaatatgctcaagatttaaaggagaaacataatgatgagaaaaatgggaaaaatttttttaaaaccaagtagaatatctcgagatgaaaaatatagggggctgggtgcggtggctcacgcctgtaatcccagcactttgggaggccaagatgggcggatcacgaggtcaggagttcgagaccagcctggccaaaatggtgaaaccccgtctctactaaaaatacaaaaattagccaggcgcagtggcgggcgcctgtaattctagctactcaggaggctgaggcaggagaattgcttgaacccaggaggcagaggttgcagtgagctgagatcgcaccactgcactccagcctgggtgactgagcaagactccacctcgaaaaaaaaaaaaaggaaaaatatcatgtctgaaatgaaaaattcactgaatagagttaacaacatactaaagactgctgaaaaaggttgaacttgaagacatagcaatagaactattcaaaataaagcactgtaaccaaaaaaagactgaaaagagcctcagctacctgcagaacaatgtaaattaagactaacatatgtgcagttggagttcaaaaagagaggatagggtagcaaaaataatatttgaagcaataatgtcaatctttccaaatttgagaaaatttataaacacgcagatccaaggagctctataaacacaaaggaaactacacaaaggcacatcaaaatcaacttgttgaaagtcaggaatgaagagaaatcttaacagcagccaaagaaaggaggcacaattacttacagatagagaaaaatattcacagacttttttttttttttttttttttgagatggagtcttgctctgtcacccaggctggagtgcagtggcatgatcttggctctctgcaacctctgcctcccgggttcaagtgattctcctgcctcagcctcccgagtagctgggattacaagcgtgtcccaccatgcccggctaatttttgtacttttagtagagacagggtttcaccatgctggccaggctggtctcaaactcctgacctcaagtgacccacccgcctcggcctcccaaagtgttgggattacaggtgtgagccaccacacctggccacagacgtcttatcagaaactatgcaagccagaaaacaatctttaaggtgctaaaagaaacaggaaaacaaaacaatgaaaaaaaccccacacttcagtaaatatgcatttcttttctgaaagatataatcacttctcactgcctccaccaaacatgccccggtccaaatcatcatcatctctcacctggaatatttcaaaagcctgctaatgagtccccacacttctatatttcccccgtacagttttttttgaacagcaatgagtggtcttagaaatcagatcatgttatgcctcttttgtctccctgctttttttaacctaagttttgcctcaggatctaatcatgcttcttctcaaaatcctcccgtggctccccatttcactcagagtaaaacccaaaggtcttgccgtggcctggagaccctgcatgacctagtctctggctactgctctgagctcacattctaactcccacttgcccctcctccaaacactattccagacacactggcttccttgcggctcctccagcaaaccctgcaagctcctcctaagggaccctggcactggctggagccctcttcctccaggcagccacatggctcactcccttacctcattccaagcctccactcaggggtcacatcatccaagagaccctttcagaccaccctacttccatcactttattcttaccctggttttgttctttttgcagcatttaccaccacctgacatttatttgtatgtttattttctatctcccccaactagaatgttagctccataagctagggactttgtctacttgttcactgctgtatccctggggattttcagttgctggcacatagtggagcgctcaagaaatatttgttgaataaatggatcaatgggaatcatgttttctggatgccaaattagaatacagggcctgctaactgttctggaaagtatgacgtgtgaaatcagtattaccccctaccccacacggcaccatatttttctggagctctccagttctagactcgttgacacataaaaatattttggtgctagtcctggggaaggcagattattggtttaagattcagttctagccacaggctgcactgtgcataaatctaggggactacatggagttctgaatgacatgtgtctcactacagtggcattacagagaaagcctggaaacattacaagggagtagagccagggccttgtagatactggctcattcaatcctgcaacccagaggagctgggcctcctcctgaagggcctgcatcacctccttccttcttgtttggccctggggacgaccggtggtggggaggtggggggaaggtcaggaactgagatagaatttatcagcgtgctggctccgagtctgcagctaggatgccctttagccacaaacagctataaaagaataagctttatggaaaaacattaaaaaagaaataaagcaagaatgtagatggaagtgaaggggactctagggacaaaaatgctatgaattaaggtcattgccacacaccaacctctgctgcacccccgcctccaccaatggtagtgcctttcccacctgcagggcacagggggctgccctcagcaatctccgagcagtgaggggagggctgccctgctgagcccagctttggaggaggggtatcctcctccagcctcagcctgcttcattccccacttcctttgtggctgcagcatcttcaactgccttccccccattatgagacatgcccacaaatctccagatgcattgttagaaaccctggggccctgtagagcctggcggctcatgcctgtaatcccaacactttgggaggctaaagtggacagattacttgagtccaggagttcgagaccatcctggccaacatggtgaaaccccatctctactaaaaatacaaaaattagctgggcatggtggtgcatgtctgtaatcccagctactcaggaggctgaggcacaagaaccacttgaacccaggaggcagaggttgcagtgagcagggatcgcaccactccactccagcctggatgacagagtgagactctggctccaaaaaaaagaaaaaaaaaggaaagaaatccccaggcccacggtcagcccctttgcctagatcttcctgtgtgggcatgatgtcaagaaatgaggggggaatggagagcaagaagacccaagatcagcagaggtcttgttgagtcttgttgagtgccgataaccaaattctgtctttggctcctgaaaatatctcttaccccttttcttttgctcctttccaaaggccacatgatcccccagttcctatccctagtcccctctacccaattcatcctgccacaaatattcagcatcctgggctgccatataaacaaatgaacaaacatttactggttctcaggctatgcaagggtcctccccatgaccctgtgaggtagacctcattgcaagagtatatagctcttcagtccaatgtgacgaattctgctctttgtttaaagtgtgaacaccagtagctataaaataaaattataacgcatagattatgaaccacttagagcgcgtaaagaaacaagtcatgttggcagtcctcttgaataagtttggaatcatatagcagttcagagctgaatatacaaactaagcacatattcctcagtgatttatcactgatagagatatataagctgttttttttggtggggtgggggggcacccaggatctcactctgtcacccaggcagaagtacagtggtaagctcttgataaagtgaggggacagttgataatggcctgatttaatgtttgaggtgaacagccaaaacaagggacttcacaattatctggttgtttgaaggtagttctagagactaacagtttagactaacgaggttgcctgacttaacggcataactatatagtgactaaagtgccagaatcttcttctaaaatagtcatgatcacattacacccctgttcaagaactccagtggtttcctgttgcccccataccaagtttaaatgtttccacctggctttcaaagccctccaatatgaccttaacctattgaagcagtttcacctgtcattgttccttaacttgcttaaggcaggctggtcctgacctcactcacactgttctttcaaacctgcctaccctgcaacctgagaggtggcatcagacatactggaaagaacaaaagatctggggtcagagaactcagctcagggtttagctttgccacttacatgtgaactcagccagattatctattaataaaaatataagcccacattaaagtgcttatgaaataccagggccagactaagtacctgcattcattgtctcatataattctcccaaccaccacatgatacaggtgttattatgattcccattttataaatgttaaaatggaagctttggaagttcatctattcaacaaacacaaggtactgtgctaggcaatgggaatataatagtggacaagagagacaagaaccctgttctcatggagcagggagtgagcagaggtcagggaacaaacaaacacataaacacgttatttgctcatgaacaggatgatttccaaaaacggtacatgttctaaggacaataaggcagaatagtgtgagggacagtgactaggggttagtgggggacactactgtaatcagggggaccagggaaggctcctcaagggtgacattttagctttagatatgaggcttgaatgtggttaagagaagtcagccatgccgtgactcacagagcagtgcgccaggcagcaggaacagcaagtgttaagtgcccagaagtctgatctgggtaagtccagcgtggctgtagtgcattgagtgaaggggaaagcagtgccagtgaggctaagaggggtcagggccaaattatgcagggccttgagtgtcatggtgaagagtcagattttttgcaacaggaagtcactgaaggatttcaaacaagcaaaggacttggcctgacttccgcttttaaagatctctttggctgtgtgtgaagaacaggctgtcaaggagcatagagaaagctgggggattggttagaacgctaacttagttgccccagcaagaaatgatggtgacagctggagtagactggtcgtgatgggcagcgagacaagtggatggaatcagaatgtattatgcggattgagctgacaagagttgatgatgaattggatatgaaagtttaggaaaaaaagaggaatcaggacaactctttatatggatgacatttattgatatgaagactcatggagcagtgtaccaaggagcaggaacagcttgtgaggggaacagtcaagagtgggatatagcaggaatcaggagttctattttgggcttttaaaagttttgatacatattgaatatccatgtggagatgtcaagtgggcagttggacccatggttctgaagcttagtgtagaagatgggttattcatcaatagataaatgggtttaaagccaaagggtgtgagggggatcagagtatgccatccccaaatatgtcactttagcacaaggattgttttgagctgcaggcaatttggaagcagcagatgcaaagaaagctccttatcctcccctatctgcctaaaggcaggacataaatttccctttgccaaggtgtcctccttaccctctctgtactcttaatcactggggaccccactgtcactctagagattttacaagattgagtctgcataacaaaccttactaaaaccaaagcttattctccattagtttccctcctatatttatcttcccataatttaccacttctagaagtccaaactccttttatctcatcattacttcacaatttatcactctttgttaaaatggtatacaacttctttttaggtaattccttttctatgaaggcctccatatgtatatgcaataaatcttttctcctattaatctgtcttttaattcagggccctagcggctgaaaataagaaaatgtaggggaaaagcttttcctctacaggtgagagattgtttggagacagtccagagtgaggactgagcatggggccctctcatactgaaaggtcacatagagatccagcaaaaaggaccaaggaaagcagccagtgaggatcaaggacagcatgatgttctggaagccaagagaaaagaggagtttgaggataaatggtcagccatgtcaaatgttgctgagatgctgaggacaggcaagtcatcactggatttttttaggaagggggccactagggaccttacaataacgtagtcactggaaaggtggggctggactcctgattgaggtggatccaggggagaagggcaggtgagggagaggttgactactcttctcagaagctttcctgtaaaggagggcagagaaatgggaaagtagcaggagggtgatgcagggtctattaagaaggaagaatatacatgtttgcataccgatggagtataaattaacaatgcatggggagtgggtaatgacaggaactaagccctggaggaagttagaggaagtgagacccagtgaagctggcatttgtaagtgggcacttcatccactgccacaggagagaaagcagctccacatggtgggtggatttaggggtgtgaagattacttctgattacttttattacctcaatggagtgtgaaagaaaggtagttagcagagagtgaggggaatgggaggctaaagatggaagagggaggataagtggtggacacagtaggaagtacagtgggatgtggggggtgctgccagtgtggagtgtccagctggtactcagggtcaccaatttaaagttggaccagtcagcatctctgcatagtttgttagccatattcagctgcttgagggcagatgaagaatacgtgggaagttggtattttgataggggtacaacatagggagagaggggcaaggaagttaagggtctctgaaaagggaatgaatccaagctgagttaaaaaagaaatgcaggctcaaagaagatggtggaaaaataagagtgggagtgtaaaggacctgtaggtcttacagccaaaggattatgatctcacccaaacagggtgatatcagaggatgggagctggaagcatgggaggtggtggtcagaggtgagatgtttagagtcaaaaactttgaaggtaatgcagttactagtaatagcaaggacatacatagatagaaccaaatgacctgctggggtgggatggaaagaaatatggttatagatgagatggttaaggagcccagttcttggatgcatcatctgtgggaggctggagaaggctggagaggaactcagtgaggcagacttcagtgaatgggcaggagatgcatgctggcaaccccaatgacagagcttgctatggtttgaatgtctcctccaaaacttacgttgaaatccaatggctattgtaagacttttaagaggtgagaactttaagaggtgattggatcatgtgggttctgttctcatgaatggattaatgtcatcatcactggagtgggttggttattgcgggagtgggctcctgataaaaggatgagtttgggctgattctgtcctgcacttgctcaccatgtgatgccttccacatggatgactcttgccagatgccagagccctctatcataaacttcccagcctccagaatggtgagtgaaatcaacttttttttgtttgtttttttttaataaattacccagtctgtgatattctgttatggaagcagaaaacagaccaagacaagctaaaattcatacccaagaccagggcccccagcattctctccctaaccactacattgtactgcaaattgtcacttggcaatgcagatttcttcattcttaaaatggatacatgaataatgcatacctgcccggctgaacaatgcacatcaaggagctttgtaaggcaatttccgtatgttaggcatacaatccaatctctgcttgactgcaccaagaggcccgaacaactccaatcagtacaggtgtatgacccacttcagctcttgttatatactctgctgaactgccttctgggtcatgtatattgctcactaatttgatgttaggaactgagatgccttagggattcggggactgtgaaggtagaaacggcagtaaggtggacttcatgcagctgctgggttcctgacattggttacaagttacatctctctttaaatataatggggtatgttgctgcttacaggagctttggaatgaatccctttgagaagcaaagccttcttttacaaagcaggtcatcatctgatcatcatattttactttttataaaacaggtgcctaggtagagttgggaatcttggaaacggccattcattcaaatttacattgattctgaaaatatttctgtagcccctcccatgtgccatgccctgtgccaggcactggagacatggaggggaatggaggagatagcgttctcatcttccaggaacccagaatctggcaagagaagcagatgctaagcacacagtcacacaagtgattccatgccaaaccagcaggaagtgtggggagtgacaaagagggtgctggcaggggcaggccctgcagtcccacttctgcactgacacaggcaaggacctcttccctgcctgccactgaggctgccagaccttcagaattagctcccatgcaatctcagctttctttcccgaccttccattttagaagagaacccagcaatccaaacctgcatggcctccaaaatgcaccccgcccctaggaaatgccaacacactcagcacaggcagaggcccgtgcctacctttccccctcgcacctgggctgtccctgcagaattcctggcaggtcctggtgttagcagctaaacaggctcacacgaggcgctcagaattcagaacacttggcagcagggaagaggatcatggccatttggaaaggattagagaggagtcacgcggagtgcgattcggagtttgcgtttatctcaactgaaactttccagaaagctaggacaactgattccaataaaagcttccccaagtatttttggaggcattgtgatggtgctgggccgtgtgggtgggggtggcttttcctggtttgtggaattgcatttcattactgattaaacttccgtcaaatgtgtgaagcaacctccagtttctaaggaatgtgtcctgggcaggtgaagagaaaaggcagaaccactggactgagaggtggaattgagcagggcctctttatggctaagagatgtggccaaggccagggccagataggaaatctgagtcagtgggaaaactaggaccagaagcccccctagttcagaactgaacttttcctactgctttctgagggtaacaagggctgaggcttagaattgtctagtttggtttcagtccagggcagggtcaggataaggacccagctgactcagagagccatggaaacgcactgccagggaggggagctccagaatgagctggctgccctgctgcacacctgccagccactgagagagcattaaagcaacggcccagcagaggggctcatgcacagccagcccctccagctgtaggagtggggagcccagcagggaggccctgggaggttctggaaacgtggtctgggcccagcttgctcagtttttattttttgttgttaatttccagcagtccagggttttcagttactcattcattccatccactcaacatatgttgattaatcacctactttgtgccaagtattatgctccatgattgacagaaattacctctttgctgcacttcgaagtagtcattcaatgcatagctgctgccatgatggttattatcatgttattaattgtaacagtgacaagcactactaagatgtagcttctgaggtggagaaagaagaaactacgttttctgcatacctactatgtgctgggccctgggccagctttagacacatcttaacccactgaacggtggcttacttcgcagatggggaagctggcatagaaacaaatgattggcacaggtctgagggcagtaagagggacttcacagtaggtccctctctagtggcaccatttgagctggatcttgaagactgatttcacctggtagaaaacagggaggaagggaagggcattccaggtggagagtacagcatatgtaacagcctagaggcttaaagtgcgaggtaagggggacagaagttaagggtggctagagaagagagtagcactggcaggcgcttggtgcaaggtctaggcagggtctgtttcaggacatgaccttaggcagagtctccctcaagccaaccacccttcaggaggcgagttctgagctggctatgtccccaggctttccttgctggtgtgcttaagggaggccctcctgtttttttggttttctgtcccgcctgtccatgcccactgcagctgtttccagtgcaaggctgagggttctcaggtctgggcgggagctcggtcctcttcaacaagttcccagagttctggtgagctctgtgggaagcacgtgctctaccctctccgatctggttggcagcctccttcacagagaggtactaggtggcgaaggatgggaagcaggcagccctcgctttagtgtagccactgacactgccagaagcacagcacagccaaatcccagagtccccaaactgtgcttcagctctcactgatgcctcctcatcctcctcctccacccacacaaccctgcagaccccaggctgggctatggttcttccccctctgtggaactgcacaattcagagacagcagagatcttgagcagtcaggagccgtggatcctctattctgccattgactgacttgctgtgtgatgccaagaaagttgcttaacctctctgagcctgtcatctgtgaaatgggatataattttctttgctgtcctaggatttttgggagcttactgagtaaacacagataaaaacacagtgaactggcaaacatgacatgtggcagggaggggagtcaatcagggagaccaacaatgcctcagttatccccctcactccccagaacaaaggcattggctgctggcatgatggagagtttggaaaggggagatactggtgggctctgtggcctcccctggccccagatcctgtcctgctccgggaggcttctgcctgggaagggggtcccggtgcttcctccacccaccagggagtcatggtagccctggggtgcagggagcagcagcctggcacccacacatggggctatttgctgcagtgccttccttcagcgaccttcacccagcagccatgacactggacccacctcagagaagtgtggcgggacctggcctcagccagcatctggcttccctgctactcttcaactccatgacctcctcctcagcctaagcactgccaagaggcctcagcacacctggaaacaaggagggtggccaggattgtggctgcccagggctctgctccgggtgtggggggcagagaagcactggatgtcactggtctaactcaccactcaatcattcattcagttatccaccaattacatccttgacaatgattaaagagcactgcgcctatgagggatgattaagatattctagttgaggacccaaagaaaatgcattttcaaaagtacccttccaggctggttatgtaacagcataggacacaacacacccgagaggcagtgaccaaccagagtgcagcaggtgccacacagcaggggggctgaggcccagaggactggaccatgcacagggtggtgtggccgggtgagctacagggaaggaaatgtgccttggcctcccctccttcacagagaggcagggcagggctcaccaacagggttgccgagatctggggagcagatgctactcatggttaccaggcactgcacccatgggttagagccttcagtctttaaagtaaccccatggggtaagaaccatcatggtcttcactttagagaggaggcaactgaggcaaggagaagtatatccactcaccagaaccacacagtttgaatacttaagaattaggacgtgaatccaggcaagcaggctggctgcagtgctggtgtgtttagagtcgacactaaactatactggaaggaaggatatgagccaatagtcttcccagatataagaacatctgagctaagaaggggctcaaaggaccttgggcattcccttcttttagtaagggagaaactgaggcactgaatggtgatatgtcctgcctaaagccacgcagccagttagtggcagagccaggtctagactcctagtgcctgactcaccgctgttctctctaccctagcgactccaagtgcatcagcataggcattgccaggagctcatgaggaatgcagactgtcaggtcccaccccagacctactcaacagaaactacttggtaagcagattcccaggtggttccaggcaccttacagtttgaaaagcactgctgcatgctatcctaccttcctggtctgtaacatctgttgctgttgagtataaagacactgtgaacattgtaaaatctgcaattacaagattctggatgcttcatcctgaggtcaccttggaatgagatcctctgggatctggaggaagcagatggaggagaaaccccagggctcaatttttctaagggcccaggcacaccagttaccactgacctgctagtaagccaggaacttagccccatgttgggggttggccaagcgcagggaggaggcagcactcacaagacagagtccggagcattctccaccacagccagtggccacttggagaggggacctagagtcccctggtaggtggctagggaatggcagggtttggggtagaacttcctggggccagagtctcatagcagtggtagccaagagttggcttagggtgagagccaaggggcttcagtacccttcttcattctctaccagcacctccccaacctcctggaaactgctgtgcttcctgcagtttcaagcccctccaccccctgttcctcaccaactctccccgtgtagaaactctgcagagagtatgaccgtgtctcttaaaaaaactttggtgaggatcagaggctggactctgcccaaagcacccaccttgggctccacacactttccggattgctggctggtggccccatgcagagcccccgaccccggaaagtcagtggaactggacggaaaaaatggaagggccagaaaacttggggaggactccagagctgggggtgacacaggaatagaccaacggccttttgttgtttccaagatcctctgaatctgaggcagccaaacaaggcatgggagtgctgctccaggtgtcagggatgggtacacttactgaacacttacccaaggctaccaccaccatctccagatcaagcaggagtttttacccaaagccccctcacaagtcactcagcctgccttctgctcctcagatacccacccttctctccagctcctcccctctgtgcgtagcgcaacactcaccccttctgggaagccttggtgccctctcagaactgtactggattctctacttgtctatgtgagcagtgtgtgtgtgtgtctgtgtgtgctgtttgtgtgagaattatgtgtgtaagaaagggtgtgggagagtgagagagatacacctacctttggcaatattgatgtaactcttctagggaggatgagagcgcaagctctcagggaatccccctttgacttgctgggtaacttgggcaacctctcctcctctctgagccttgtgtaaaatgaggaacaagggtaaattcacccgctttgggctggtcttggagatgctctagggctcttcagagaagacttcagggagcgggcggcaactgaggaaaggcccactggtccggactccagcccccacccctaattacagcagctctgctcctatttgctataatgggctgattgttggcttttgttgacaaaatggtctacatgcctggggaaagttatgaaggatctttgtggtgcttccagctagaatactctaggagtgtacctttgctccattcggcacaattctgagctgttcgacgcggaggcccttgggcatagtcaagactgagtggaaatatgttctctctcagctggcttggcccaggaatagcggcagaccattcctgggagtccaggggagagcagggggatccaggtacctttcttgtctcagtttttgatggcctggcagtgcccccacctgttttttcttcttacctttctccactctcccagaacttcccaaaggaagctgctctcattaaaacaagggaggttgaagatcctaacgccacaggcttgttcgggaggcagctcacctcctggaactgagtgcagtcctggagaaaaccaagtggatgtgcggcccctttccatggagcaattaggtggataactgtccagtcgctcctaggctttgtagaggcataggctcagatacaaagagaccagacagtctctcgctccaaaggggctggccacaagcaccatgaagacagcagtacccactgactcagcaatttcaccagctggaagtcatcccaaggagatatcacagaaagaaaaggccatcttgcgtaaagatgatcactgtgtcattactcaaaatagccccaaactgggaaacacccagctatccagcaataggggtagtgaattacagaacatcaactagatggaatattatgcacccactaaaattagactacgtgaaaacacagaaacaacatcagtaataaaatgttaataaaacagaagcagctcagtacacatcagttagtttcctttctttttcctacaaaaggcatgacaaggaactgcaggggaacgtgcagacatgaagagttgtgttagtgcagtggtatcatgaatgacttgttctcttattcatataataaatattgtttactatgggctaggtctgatgctgggtgctgaggatggagcagtgaatggtaatacatttcctgctctccacccagagtttcaaatttaaggagatattttcttcctaaatgtccttcaaagctgtcacagcatcatctttcaataaaaaatagttgatgagactgggcatggtggctggtggctcccgggtgtaatcccagcacgctgaaaggctggggtagcaggattgcttgagcccgggagtttgacatcagcctgggcaatgtagcgaggccctgtctcttaaaaaaaaaaaaaagtagccaggtgtggtgatgtgtgcctgtgatcccagcttcttgggaggctgcggtggaaagattgcttgtgcccaggaggttgaggctatggtaagctgtgtttgcaccactgtactccagcctgggcaatggagtaagactgtgtctctttaaaaaaaaaagttgatgagagaaatacgcaaggaaggatgcgcctctccttctggataatgtgtttcattccagatatcaaaactatctccagctggattacatacatgttagaagaaagttgaatgtaaatgtggtagtgacattttgggcttataatgtcttagtttcctttgtagcaaaaagagttttaaaaatccatgttgaaaaagagggaaaaagttaggacttgttactaatctcgtggctgaataattaagtgtgcctaattctgaaagtagcaagctaaattatgcagtgccaaaagtgacaactcttatacctacaccatcccgtctacagcggcatgattttagctttatagctaaaaaacgctgccagaaaacctaataaaaggaagcaaaaatatttctgtttatatcaagctgccatttgagaaagattttaaaatatgttctttcctatgtgtaaatctgacagcagatgcataattaaaaccccagtggagagtttccatttaatcttttcaaagttaactgataaacatcctttaggatgtgaagtgatgggttaattctgtttggattgtttggaatatctctgagctggaatactgtcttcaagaatattgtttcgtgctaaaagaacacaagacagttatctttatctttaggagttcatacaatcacaggaagtgcagacaacatgccaaaggccacacatgcatctatgatgagtgatgcttgtcttagatgttttttaattggcagaatgaataaatggatacattcacattaaaacaaacttgatttcaacccccagggaatatgtcacatagcataaatgggagaaataataattacccaggatttcagttcagtgtaagcaatcggtatgaataatttagaccacaaagtggatttttatttcgcttgagctattcagattgactttctacacagcctgaacggctgctgaataatcacaggcaaaattttccactggtaccgcactgtgtagacacacgtgtatctacacgattgcaaactgcccagctgtggatacggggccctgttcaaaccaaatatcaggacaaacattctacttcattgtggtgttccatgtaaccttgagtacacacagccatacctgaacctttcattacgtcttccaccaggtgaaagcccattcctgctccttcttcccctcctctatacacatgtgctctcaagagtgtgtgtgtgcacgtgtgtacacacacacgtgcacacacacatacacacactggtgcaaaaaagggcagaaagcaagtgacttctgtccttagaccacagtttgccagaagttctcctacttgctagtaccccatctctgccctttaggctggcttttgcctgtctagctaactaagacctgccagatgcttctaacttgtctggcctgtaaatctgtcttgtccttcaagttttctctggacttaatcagttgatgacgtgaccaatagaccagcagaccagtccctgccctggttacacacacatacactctctctcacactcagacagacagacattattaaatattgcaatctcaaacaagaacgttcccaccaattatatgcatgaaattggtggatattgcacaacttggtttctggacctagctgaacccctcattaactgtgtgaccactgacaagtcccctaaccctgtgccacatgagattggaccaaaaaggtccccttcttgttctaatcatcttcagtgaggatggccaagatacgttgctcataaatgctgtgatccagctgcccatgttggaatatgccttaatctctgccatgcagagtaagctttaacctttcaaaatacagcctgatacatacaatcatgttacggaatgaatggaaggaaagatttccaatactaaagtctagatgaatcacatatctgggtctacacaacacacacacacatacgtatgtccttttgattaggcagtataaatagctgaatcaaatcattttgttcccctgaattccacagcactgtatgaaccatatacactgtgatactcactcatcaaataaaactgagtatgtgctaattttcctcttcattggataaagagtcagataaagaatcctgactgcccattttttgtggactgaggttttgctccctgatctgttgaacccatacaagcatcaataataataataataattgtctttgaagattcaggccatttaagagaaaggaactatgtaagcagaagagaaactgacctgtggagatctttacttaaacctcatccaaatgcattttgcaaagagaaagctgaaatgccaattatgctacttggggattcagcagaacttatctgactgatggaagtgaccaatttgaaccactgaccccagaatatcccagcaggggcaataatcagcagagaccctgctacttttgtggctgtcttggcatcctcacagaggcctggttcaaccctgagctgtacacaggctggtttaaatgtttccccgcagattttggaagcaacgtgctgggtcactcgtaatataaccacatgcttcagtgtagccctcctacattgcttgcctacatctgaaaacacgaatcaagaaagagaatatagctcctttccacttgactaaagaacagtcaatcctgccagtagactaaaggctggggcatggaacaatttcccaacacactgacttgattttgtgtaaactgctgaaagagaagctttagaagctgtggctgggctcagaatcagtgcctccaaaggagcaccgaatgacagattgatggagctcatcagagaggcacagagaccacaggccattggaatggggccttatttggatggactcatggcccaaaaaggaaagggacactgccaacagcttcccctttagcctgtgggttccattaggaagccggaacatgtcactgggagaaagtgctatgaccacccaatatgtgcacaggtgcctctaggtggaagaaagggaaagggcgtgtttacaagaagaagagcacaagtcaacaatgagctatggatgcatgatgtcatcctctaggactaagcatccttagtacttttaaagcacttaaaaaaaaaaaaactctagttgctatagcaacttgatgcagctcttaaaaggggattttttttgagggggtcattttatatcttctatcaccataacaacatgatatagctttttaaagggtatttttatccaatttgtgtgtgccttggacttgggccatatttgccttttctatttaaaataatcagatcaagcatgacacatgaaaaatcattgaaggcaaggaagtgctttcatagactatacatatacacttagagagacatctctagctgctcatatgctgcacatggaggcagcctctctccctgcctccaaccagccatctgctgtggcttatcctgggcagttacagtccatgcctctgtatctgaactggcataccaaaccactccagaaggtgtgtctatgaaatccctcacttctcaagcccagcaaatccagccccctcctccaaaactgcacaggagagagtgccttagggtgactagaggtgtgaccagccaagtgccttcttccatcctgggattcaaagcaggagtggggggacacacacagccttgtcaaggtgataagcatgcgtttctgctgcactctatacaggtgagtaaccgagggtgggggctttgtttcacatgacacccagggcccagggaaagtgggggatgggaaaagtgagtgagaggagaggaagaaagaggaatgaaggggtggatggagagcaggggtggctccagaatttctccacaggagctcagaggcagcaatctggccacagagggaggggtgggggcctgaaggagtattgacacagcattcttcataaggttgagaaaacgtgaactgtttatatccaaaaaaagagagaagagatgatggaaagaataggggaactatccctgctcccagctaccccttggtaccactaatggttggaaaaagtggcaagggaacaaaaaaagggtcaagaaattggagaaggggctgggagctgggggagaacacaaggaagggaggcagaacaacagcagctgaagtcctggcctcaggctaacgggctttactttggggggcggtatagactgtaggagaagcaagtgggaaggagatgtagggaaagtgatcctggggcaagtggtcaccctctccagggtaaaggagttagaggccactgagggagaaaacagggtaaaagaagaaagcgggggagactatgaaaagaaataaaagcgccgagggtggagggagaaggggcttttgagatcatcctggagaggaaactgaggcctgggggttgtgggtggaaaacaggaaggaaccggtagcccttggcacgtattcttagaggagaaaacggaggctcacaaaggtcagatcacagagccggccagtgttggagcacaggcggcccggggtgagcgccagaggtgggctttcttccctcactgaaagccgggagggagagagagagagagaacgggggccggcggagaagagggcgagacgaaagtaagcaaagggacattagaagggaaggcagagccgagggacgcggaccgagcggccgagcagtggaaagggcggcaggtgaaaggcacagagaggaaagatgcgcgggggacgcgccgctcacctatggttgacaccacggtgcccacgaagtagaaggcgccggggaagtcccagcgcgggcgcagcgcgtcggcgcggacgccggcggccagcgcggcctcgtagtgccggaggaaggcgcgcagctctggctcggccacgccgtgcgcagcgctgaagttgcgcagcgtggcgccccagcgcgcccgcgcctccgcctcgccggggctctcgagcgccgagaagactgtggcacccgccaccaggtagaggccgatgagcgccgccagcagcacgaagcggccggtgtcctcgttgaggtgcgaacggcggcagcagcagcagcagcaggaggggcgcggcaggcggcggcggctacggcggggcgggggccgggggctgcgggaggacatggtccggagctcagccccggggccggggcggcgctcggggcccgggccacgacatccccccggcgggagcaggagcgtgaggatggtggccaggggtccggggccgccgcggagcccctcgccgccttcgcagagcccctcgtcgccttcccagagcccggacagaggggcgcctccgcctcctccccggcgctcaggccacacgcgagtcccgtggcccagcgggtgcccgggcaggggcgctcctctgcgcgccccgacgcctcgccggctcccgcggctccttacccgccgctctcgggcgcggggctccgcagctaggcccctgccgcccggtggccggcgtccgcggggccccgggcctcatactcctctccagacaggccgcgggctgcgggcggggtgggccgtggatcccgggcgcctaggaccgggacgcggcagcaaggcgtggagagagcccccgggggcgtcccatgaggcgttcgggatcggcgcctcctaggtgcgggctgtgcgggcagtcctgctcccgcccccggggctgagctggcggcgtcggcttcagagcctcggagccgagccgagtccggggaagcgctcctttctcagctccagccgaagagccgcccggcagggagaggcggagtcactggcgcccggggcggggtgttggggaggggtgagtagggacaggagggagggggtggagagttgggctgctgcgacgcctcccggtggctctggcggcaccaatgcggggcaccggagcaggtgtccgactgcggtgcgggctaccactccgccggggaacctcgtcttgctcctccctgcgcttcgcctctggaatctctcccttatctcatgccgcggtgaaactttgctcaagttggtggtgctctgaggtctccagggctggaggccgcgcgacgcgaatcgccgacactggattctcgggcgttagtccgaagtttaagttcccttcgttcactcctttgccctggatcgaaccgcagccccaggacgcagcgggttccactggaaacggggaatcggggagaggcggtcgctgggctccgggcgacctgggaacgagggcgtttgctccccctcccgaccgagcgggcggccggcgtcagcaccgcggacagcgcatcggtgccgcagccgcgggcgggcgccgctagggctgccaggggtccgaggcgcgggcaaggctgctcaccccgctgtgctgtgcaccccaaaccttccctgttttcctttctacctcccgtgtgcacccccctacccgccacccgaggcaggtgcggtcgctgaagcaggctgctgacagggcggggacgctgcggaatagagacgggggaggagtcaagcgcgggtagggggccaaggtgccacagggagaaagagcccaggcccggcggactgccgggctcctcgcgccaccccagctcaccgacccctctagcccggggcggggaataacaccctgggtgcggtagagagtagaggaatagaggaggtgtaggggaagctcactggcagctcccctgaggccggcgcggggaacggtgtgctatggaacgcccctgggaaatggtcgcccccctacgccccaccgcggcaggaaaagacgacggatgccccgcgcggctgcgggtgctcctctgctggacacaagccggctttgccggggccacaaaagttctggcgtggaacaccctcagtacaggcggaaaatcatcctcttcgggcagccagctccttccctgtcctcccgcttactatggactgcgggaagcaagaccctggtgatgatatgatggcagaaaataaaaataataatggtgactgtacttagatatcccaggtgggtgagcggtggcaaaaagcagacccctgccccctgccctaccgcccatttccaatcccgggctaaggtcaacccaaagtggtggcagcagcgtcagtcaattacgggtcatagtactaaaagtgttccctccactactcactgagcatttcccgccttcgaaactagggccggtcgcagacaggagagctgctgaaagctgaaaggcatttgacttggggtgttgattgtcccaaaccagggtgctctggagatttggttcttcccagatatgctgcctcagtttatagatggagccaagtacacttccctctgtggtagggacagatgggtggaaactccaccaccaccatttcagaactaggcttcctggcactggatggcatgtggctagttttgcagggctcttcttacaatgggcctagggtatcgttgtgtgagggggagaatatcttatccaccaagaaagtcgaacctccctcttttctggagcacagcagaaggtgtatacaaacacaaatttttgttattgcagactattgttattattgccaaaacagtcaactctttctccaaggctttggctcccctggactctccacagatgctgccctaggccctgttcccccagtacccccactcttaacagcttcagtacacagtgaggacagccctgtcatggacctctggggctggattccgcttggctggtcagctcttgacagaagccctgagatgtgtcattctaggagttgccctggagactccagatgtaactgaagggcattgccaggcctctcagaggctatctttgcccagacttcccaagcaaacacagggtgcttcgctgcagtattctctgcctctgggaccagttccttgcccagttggcagaaggcctgtcttgtcctccaacttgctattctagcttgattagcagcaaatctctggcatcaatctcagctccgaatgacctaatcaatttgtgtaatagggaaatgatgagttccctgcacataggcacaggatttttagggaaccagccccgtgataaatgcggcttttgcccactaaatcaatatttaagctactgacttccagctggctatgctcagagcctttacctcagccctgaattgctgcaatagactcctaaggacaagggcttgcttagtgtctccccgcttaggtccatcctgcctgcacctgccagtcatcgctgtgatcatgcccatctgatatgatcatgtgattgaagtatctaaaccacagtctccaatggctcccctaaagctataaaaatgtagtctttaaacccttgaggctgccattcaaagaccttgatgaggtgattcctaacaaatcattccagcctctccttctactaacttttacttattccccaagtactctatatccagcccaatcaccaggcctttacttgtgctgtggcccctactacagcactatcttctctcttctctccagctctttacaaaaaccagctcaactcaagttagacattttttccagaaagtttttcctttgtaggatgttttgagccaatcactttgatgccatcttttcaactccatgattattgaatctgctatgcatgcaaaaatttcagataagacacgcaaataggtacggcctctctttctcttttctgtctctctctgtgtgtctttctgccatacacacacacacacacacacacacacacacacacacacatgcacgcacataaacacaatataggagtgttaacccagaaaattaggtaaggtcaaatggaaccagttggcaactccactcctaggtatatacccaagaagataaacaaaaatgtaccttcacaaaaacttgtacatgaatattcatagcagcaccattcataatagccaaaaagtagaaagtgatcaatctgtaagtccattaattgattaataataaataaaatgtagtatatacaatgacatatttggcaataagaaggaatgaagtactaatatatactacaatgtgcataaatcttgaaaacatactaaatgaaagaagccagtcacaaaggaccacatactgtatgattccgtttgtataaaatatccagaatagacaaatctataaagacaaaacacttagtggttgcttaggggtgggggttcaggagaatggtagtgtctgctaatggggatggggtttcttttggaagtgataaaaatgttctaaagttgattgtggtgatgattgcacagctctgtaaatatactaaaaagcattgaattgtacactttaaatgaatgaagtgtatggtatgtgagttacatctcagtaaagctgttaaaaaacaaatacaatggaccaggcatggtggctcatgcctccaatcccagcactttgggaggctgaggcgggtggatcacgaggtcaggagatcgagaccatcctggctaatacagtgaaaccctgtctctactaaaaatacaaaaaaattagctggacttggtggcaggcacctgtaatcccagctactcaggagactgaggcagaggaattgcttgaacctgggagtcaaaggttgcagtgagccgagatcgcaccactgcaccactgtactccagcctgggtgacggagaaagactctgtctcaaaaaaaaaaaaaaaaaaaaaaaaaaaaaaaaaaagatatgaattgagataatctttatccaaaaaatggaaacaaatttatcccaaggaggccgggtgcggtggctcatgcctgtaatcccagcactttgggaggccgaggcgggcggatcacgaggtcaggagattgagaccatcctggctaacacggtgaaaccccgtctctactaaaaatacaaaaaattagctgggtgcagtggcgggcgcctgtagtcccagctactcgggagcctgaggcaggagaatggcgtgaacccgggaggcggagcttacagtgagccgagatcgggccactgcactccagcctgggcgacagagtgagactccatctcaaaaaaaaaaaaaaagaaagaaatttatcccaaggaaaataattgcttttagaaatgagaaaatttgaaacaatttagttgtgttacagagaaaattatgaaattaaatttgaataaaggagtttcctccaaaatactttctcttaaaaattaatctgtgatggtaaaattttggtgacaagttttgcattccaagtagtagcagattcaaaatgttctggttgccttcaaacctctttgatcttcttgttctcagaactcctctagtactcattgtctgcattacttattggcaattagctgtgtaacgggatacttttttttttaaatatggagaagatggttatcgctatcctgtgaagggtcagttgcgttgccttcttagtagtatagatgcagcagctcttctccccccattctcctggaattaggtttttataaaaccttttatgttttaagtcatttggcaaatgtttcctcacaccatgtttcacagagctggtaactgggaagaagtgaaccagttttacccagggccttccagaatggaagggaaagacatctgatttgtcttctgtgaatttaagattaaggggtcttgttgagaaaagcatggggagagtctggtcacagcccaggacctgggagaaaggccccttgaaataaaattattctggggaagcaggagtctgactggaggcttagacaagggtctaagtgctttggtgacacaggatgtaactgatgctggatgccctgtagttcgatctccctagaactgtatgggatttgaagacaagggttgaatctggacttgtgacctgagaagacagtagccttggtgcctgaagtggttccttatgataaagtgcatcttgagtggtaataggcaagaaatgtctcaaatggtacagcagcacttaacgataacatttgtaatagcacttacaatactgtcctccttttctttccattggcatttggaggacagggttcctgttggactgaaaaaaaacatgggtaacgtgcctctattttcatattgctcttatgtctagatgttctatccattattgaaggtgaaatattgaggtctgcaactacaagagtaaaactatctagttctcccttcaattatgtcaatgctggtgtcacatattttgaggctctgttgtttgctgcatatatgttacagttgttatagcttcttgatggatttaccctattgttaatagagatggtgtctgatttacaatggtttgacttgcaattttttggttctacaatggtgtaaaaccattgcacttttgacttaatgtgtagtagtcaataaattacattaagatactcaacactttagtatacaataagctttgtgttagattattttgcccaattgtaagctaatatacattttggacttaggatattttcaattaatgatggaaatataaaagaatttatcccaaggaaaataatttctttaaaataaaaaaaagggaaaattggaaacaatttaactgttctatagagaaaataatgaaattaaatttggatgtaaccctatcataatttgcggagcatctgtatatgatgtccttttttggtctcttataataaattttctttttcagacagggtctcactccattgcccagacagaagtgcagtggcacatttatagctcactgcaacctaaaactcctgggctcaagcaatcctcccacctcatcctcccaagaagctgggactataggcatgtaccaccatgcctggctaattttcttattttttgtagagatagggtctcactatgttgtccaggcttggtctctcaaagtgctaggattacaagcatgagccaccacaactggcctacaacaatttttggcttacagtccattttttctagtatttgtatagccacccagttctcttttggttaccgtttgcatggaatatctttttccattctttcattttcaacctatttgtccttagatcttcagttagtttcttgtaaacagcatatagttgggtcttgagactatcttataactcaacttgttaaaaatttgtgactgttcagctgctctctggttatttccaaataactgatgaacagatttttattgagaacctaccaggtataaagcagtgtactataaactgtgtgtgtgtgtgtgtgtgtgtgtgtgtgtgtgtgtgtgtgtgtgtgtgatgaaccttactctccctgcaagagcttagagtctggctggggtgataagatgcacatgtatgaagcagtaaggactatgatatagcagatacagttaggagctgactgtatggtgctggtcacgggaggtcagagaagggagcctgtaacaagggctgcaggagtcagaggaagctttggataacaggaagaatgggggcaaggcctaacagatgggtaaggtttggattgactgaaagagagggaacatcccaaccaggagtattgacctgggtgcaaatatagaagcaagaaaaaacatattgcgttcaaggaactatggtgggcgcgtgttgagtatgggtgagaggagagggaagagtctgtttcttataatccaggacctccattggtggcctctcagcctctcaatacaactttagggcatagattaaccgaccctgtgaaacccaaaggttagttttttccttctaaaatgagagtcggatatataatatatgtggactctggcttgatgaagccaattttatggcaaactttgttttcccacaaacatggccacactgaaaggcacaagctatgtctgcaggggaaaaggaagacaaattgggaacatactgggtgcaaagttgggggctctggtattaaaacctccttgggctcagttgccatatctgtctttgtgaagaatgcactatgtcatctttaagtcaccataatatttgaggattaatgaagctgattgctgcctgttgatagggagttttgaaatgaagacaagaatcccagagtgaagaggagccttaaagctttgagggcaactccttatttcctaatcctcttgtgtagaaagttgtgggttccttgtctgaatgtctttatggagtcctgtcttctaatgctgaatcactctttattaagaagtgattttttaaaaatgatttttaaatatctatttcaactctttcttattttaaaatctaatccagatttttttgttctctaggtaaggccattcatgtgttgatttttgtctcaaatggattttgatataactttttaagactgtataagtaatgcataattaaattctgataagacttttaaaaactatataaagtaatgcataattaacttagaataattggaaaattcaggaaagctaaaaataagaaaataagaattacccccaattctatcacattatgcacagaaaattactgttatcaatcattttaatgatcttactgcctggttggttggctctatctgtctatctatctacatatacatacacatatttgattttagtaaagttataggatattttacatactattttaaacttacttttttatttaacatcatacatcattcaagacatcttttgatttaaacatatttgttgagcacctactatgtgccaagcactgttcaaggtacctgagattgttcagtgaacatggagtttatattactttcatgtcaataaatacatatgaagtatcatttgttggcatagtgtactctaaaataaagttttagctgaatttcacattggtagatattgctggattcttaagatttcctactcttcttccctcttctctgtctttagttcatcactctcttttttcccctattagaatatcagcacatgtttgagtttggcttctcaatgagacttctagttcccacccaaatctctgttcaacctcttttttagcaatagaactcccattttatttgagatgtcactgtgaccagttaaaagaccctattttccattctcccttataaggtgaaactgtattttttaattctagcaaaatattatgtgggtcttccaggaaggctgcataaaagaaagctaattccacaggaaggggggcccttttgcccttctgccatttctccttcctcagtcatgcttcctagaatatagatgtgatgactgggactccagctgccatcttgaatcatgaggtgactttgaggatggaagccacagtgtgaaggagcaagttcctgcatgaatgagtctgagattggaatttaaaccttcaaatgtggtgagaccatcaacaggcctgaccttcatttgcttccattttttcctcttatctcccaatctcccctcttctctcaggtatttgtaccttgtgttctcatcatggttgactttcctgtgggatttttccctccacttggttcctctatattcttgcaattgggagagatgaaatgtcaataacttttccaatccaaaaccaataggctgtcagaaccaagagcaaaaacaaagcaagggaggaaggcttaggagaaagatgctagagggttgccatagctagtatttcatcatttgaatgagtcaggactctatgaatattgaactgatcgttttagagagttagaatatttgttttagctaggcaactctaaaaaggggatgagacccagaggaggaaagaatggaaggtggcattggaagtagatagattatggaagcaatgatttttataatgaaacattctcatttattaacttgtctgtggattgtgaaacatgcaaagacgagatttgttcattagacattaattaaaactgcaatgctgaaaatggatcacagcatagaacatgatgtttgatgtaaataaatgcgtaggaaactgggggtaactgttttacttgctaatagcccagaaatgagcattggtgagtggggaaattggaggaggggtgtgtagtaggagatgatgtgtggaggagtagcattggtgcagttaggtgtggggatgggttggggagaagagtcttggggatgcctttccaggtattacatgggtcaatagggcttctagggggaggaatgtttcttgtgaatagaaggtcttctttatagttgagcacatgagtgtggtcagtcagcttccctttttctccctccctccctccctttcttccttccttcctcctatgtaacaatttttttttttttttttttttttttttttgagacagagtctcgctctatcgcccaggctggagtgcagtggtgcaatctcggctcactgcaagctctgcatcccaggttcacgccattctcctgcttcagcctcccaagtagctaggactacaggtgcccaccaccacgcctggctaattttttgtattttttagtagagacggggtttcactgtgttagccaggatggtctccatctcctgacctcgtgatccacccatgtcagcttttaaacctgtactctgtgccaggcactgtgctattaaggatcctaactcatttaaaattgcctatatattaatgactgggtaggagggagggtgggagtaccattaggggctgttggaatagcagataaagaaactaaggccctgaagggcagtcagaggtactcacttagtagtgcatttgcagtctccatcaacccaacaatcccctgggccggctggccttgaagtggatggtattctacctccttatagtattggaccctcctgcatgcaagttccttggggctcttattgaatatgcaggcctttctgttcagcatattcagcaactcagagcctcatagtagaacaattggaggagaattgtcagatggtgatgagggagaatgaaaggggagacagaagacaaaagctggaaaagagaacagcttgagaaaggtttcctggaaagttgaaatctttgcatgcatattgagcaggagcaaaagtgctaaataaatgcattctcagacattgattacaatctgggtggggttgtctcactgtatgagccctcattatgttatacttaaaaagcataatatactgtaacctgagggtaataagccagccaaagcacttgcaggattcaccctgggagctatagccacccttagcattcttcataagcagattttatcaggagaaaacctcaggttggggtagaggaggccccactgagtgaaaatgccaggattcgagtgactctctcccctcttcccggttctcttaacagaagctatatcacaaagggccccaggctcattggaaggatcccagtttggtttgctcatttctttctccatcaagtattatggaacaccaattaaatactagatatgtggctagatgctggatacaagagccaaaattgacttggtttctgcctcattcagcttcaggatcaaaagttacacaagtcaatgaaaaatgaccatggtgacaatggctgtgaagaaagactatgttgtttcaggagatgcatatagggatatttgacttaggcagggctgagacaggtaggcattgaccaggaagagggtaagtgaatgacagagggcagctgtgcagcttggaatggcatgccaaggctgttggcaggaggagagaactatggaagaccactgtgaggtcatttggggctgggcagaggcctgatcctacagggctttggaagccctgttactggaaaggggtcccagtccagaccccaggagaaggttcttggatctcgcgcaagaaagaattcagggcgagttcatagactaaagcaaaagtaagtttattaagaaagtaaaggaataaagaatggctactccatagacagagcagccccgggggctgctggttgcccatttttatggttatttcttgattgtatgctaaacaaggggtgaattattcatgccttcccttgtagaccttatagggtaacttcctgatgttgccatggcatttgtaaactgtcagggcgttggtaggaatgtagcagtgaggatgaccagaggtcactgttgtcgccatcttggttttggtgggttttagccagcttctttactgcaagctgttttaccagcaaggtctttatgacctgtatcttgtgccgatctcctgtctcaacttgtgacttagaatgcctaactgtctgggaatgtagcccactaggattcagcctcattttatgcagctcctattcaagatggagttgctctggttccaacacctctgacagccccataagaattcctaagaaaaaggggaagccatggtgttctaagcagagggtgatggactcaccagctacttctgcctcacccaaggtctcattgtgcatcaggagaaggctgttcagagccttgactccctctctcttgcacttgccccatctggggatacccaactgctgtttgtcatgcgcatctgtgtgaagagaccgccaaacaggctttgtgtgagcaataaagctttttaatcacctgggtgcaggcaggctgagtctgaaaagagagtcagcaaaaggtggtgggattgtcattagttcttacaggtttgggataggtggtggagttgggagcaatgttttgtgggcagggggtggatcttacaaagtgcattcttaagagtcgggagaatattacaaagtaccttcttaagggcggggaaatatcacaaagcacattatcacaagggccggggagaatattacaaagcaccttctcaagggtggggagggtgtattgtcaaaaagtcaattgatcagttacggtgggacaggaacaaatcacaatggtggaatgtcatcagttaaggcaggaactggctattttcacttcttttgtggatcttcagttgcttcaggccatctgcatgtatacgtgcaggtcacagggtatgtgatggcttagcttgggctcagaggcctgacattcctgtcttcttatattaataagaaaaacaaaacaaaatagtggtgaagtgttggggcggcaaaaattttggggggtgctatggagatataatgggcgatgtttctcagggctgcttcaagcgggattaggggtggcgtgggaacctagagtgggagagattaaactgaagaaagattttgggataaggggtgatattgtagggttgttagaaggagtatttgttgtatagaatggttggtgatggcctggatgcggttttgtatgaattgagaaactaaatggaacacacaaggtccaaataaaagatgaagaaaaataggtattaaagggctaagaagtgggagtacccaggacatccaattagagagtgtccaagggggttcagcataattatttgcttggttggtgagtttttgggctctatccttgagtttttttatgttgtcatgtaccaggccagattgatttaggtaaaaacaacactcttcatttaaaaatatacagagtcctcctttttcagcagtgagtaaatcaaggccttggcagttccggaggacaactgcagctaaagagtcaacctgggcttggaggacagataaagtttgtgatatatctgtaacgctagcagaaaagtcattagagaggctgcggaatgttgtgacagaggtggatatgcctgctattccagttccaagagcaatagtagaggcagaaagtcctaggcctacaagtgtagggattagtgggatgactcttttttgttgtgttggtgtcatgagagggacaagcagttgttcattcccatctgcaaactggattttgggggtaaggaagactagagtacatgtgcccatccatttggcaggtaggcacatgtaggtggaagagccacataaaaagaagagaccttgtgtcaggcagaactggaaatgtaaagtgaaaaagtgagacggtgtactcaaagaggagtcctgcacctgaaatcttagagatccagcaagggcagcagccattagaggttataatggggattgatggtgcaactgcatagagggagaggtttggttttcgtggtatatgagaaagtgcatagtgtctatgactaacctttcactgctattcatggggcttggtataagcaagcaagaggagggcctaggaggagattcagacaagcagggggagggtagccaaggatggagtgagatgcagggtaggtgtcttccttaacaatagtgactgccaatgttttttagtttgttaataatgatagagggcttatcagtaatgtgaagttggaacgctcccatctctttgataatgtgtgtggctgggttctggagataaagagtaaaggaacgtttggacggtggaaggttgcctaaagggattccagtaggctgttgtcgggagatgcataaaggagcggcaacagggatagttgtttgtgtggttagaggtccaaatatggcggggtggaggggggtggaattgacataaggagaaaggtgccgtaaatagacgtggagaagtgtggcagcttgttggtgcaaaatatctggggagttctcaccaaatctgcctagaaagtaaagaagttcctcagatgggtaaagatgagggctattaaaggaggttcggaggtatagggagacaggagagtagcccagtcagcctgtagagcagggatggctgtgtaagagtgggaagaaagggaaatgcatggccaacaattatttgctagagaaggattggaggcagtgaggagagagtgggtgagattgatagtgtgctggaggtaactagggagaggtagagagtgactggagaatgggggcaaggataagagtgagtagaaaagtaaaaaaaaagaaagaccttcatcaggatagaagaattggagtgtaccttgccactgaagatcttctatccacttcaagagagacttaggggtggcggtttgaggtaaaaccaggagatatcagttatgatggtttggaggaaaagtgtggtatttacgattagttgagaatggtgaataggagtgtgactagacagaagatagtagggatgacaagtttttggggtgcagtccaagtagtgggagtgactgtgtaaagccctgttgcaaaaagtagggtaaggatgaatagacctaatagaatgaagggatgtattaggctcataagggttattactgctcttcagaaatgcgagtgagtttaagggaagtaggggagagtacttgcaatttccagggggaagaggagagatcaggctggctgtctgatgggcacagctttattctggaatggtgaacccaatggggagggtcctgcaggaggacggcagttgtggtactatagatgactaagtagggtccggtccatcgaggttgtagagtttgaggggtcagattcttaacaagaactgatcatccagctagggtgtcttcatatggctgggaatctggagtaggcaagagaagattagcagcctggtgaatttcctgtctagcctgatggaggactggaagatagtcgcacagaaggctggtgtctgggatgaagttggggccgagcaagaaagtgcgtccgtataaaagttcaaatggactataccctgtagcatctcaaggacaagctctaattctgagaagggcaagaggtaaaagtactgcccagtcctttttaaattggaggctgagcttggtgaggtgtgtctttaaaagaccgttagtccattctacctttcctgaagattgaggacagtaaggggtatgaagattccactgaataccaagagcctgagaaactgcttgggtgatttgactaataaaggcctgtccgttattggactgtatagaggtgggaagtccaaaccaaggaattatgtcttacagaagggaagaaattaccatggtggccttctcagaccctgtgggaaagacctctacccatccagtgaaagtgtctacccagaccaagaggtattttagtttcctgactcggggcatgtgagtaaagtcaatttgccagtcctgggcaggggcaaatccccaagcttgatgtgtagggaagcaggtgggggtggcggggaggggagcctgaacaatccctgaggagtagtagaatagcagatggaacactgagaagtgatttccttgaggatagatttccatgaaagaaaggaaatgagatattctaagaggtgggctagcggcttgtaacctacatggaagaggttatgaaatgacggcagaatagaatgggcctttgaggctggaaggagatattttccttggtccaagaaccatttgccttgtgtgagaagagatggatagatggaggttttagtgggagagtaggtgggagttaccaatgagaaggagaaaaactggccatgagggacagaagttgtaatgctcgctgcttctttagctaccttatcagcataagcgttgccctgagtgatgggatctgatgccttttgatggcccttgcagtgaatgactccagcttcctttggaagtaaagcggccttgagaagagtttttattaaagtggcattaatgatggaggacccttgcgtagggaggaaacctctttcagcccatataacagcatggtggtgcaggatacggaaggcatatttagagtcagtataaatattgatgcgtagtccctttgcaagagtgagggcccgagttaaggcaatgagtttggcttgctgagaggtagtggaggggggcagagtggcagcttcaatgatagatggaaggtactatagcatagcctgcctttgctggttagtggcgattaggcctggtaaaactgctgtcaataaaccaagtgtgatcagggtgaggaacaagaaagaaggaaatatggggaaatggagtgaatggcaggtggatcagagagatacagtcatgggggtcagatgtggtatccggaataatgtgggaggccggattgaagtccaggccaggaacaatggtaattgtgggagactcaacaaagagtgagtatagctgaaggagccagggagcagaaactatacatgtcaggtgtgaggaagaaaatagattttggaagttatgagaactgtagagagtgagttgagcatagtttgtgattttgagggcctctaaaagtattagggtggcggcagctactgcatggagacatgatggccagcctaaaacagtagggtcaagttgtttggatgaaaggctacagggcatggtcccagtccttgtgtaagaatcccgactgcacagccctgcacttctgctgtgtgtaatgaaaagggttgggatgagtcagggagagctagtgtgggggcagtatttaaagctgtcttcaaggaacggaaagaggagtgggaaaaggatttaggatctatggggtccctttgtgagtttatataatggtttccctttgtgagtttatataatggttttgttaggatggcaaaaccaggtatccaaaggtgaaagtatccaaccatgcccaggaaggaaaggagttgtttttttatagaagggtttggggtttgagagatcagccagacatgaccggcagggagagcatgtgtgttttcatgaagaattatgccgaggtaggtaatggatggagaagaaatttgagctttggagggggatacctaatatcccttggagaataaatattaaaggagcaggagggtgtcttgttgagaagattcaaaggaggggctacaaagtagaaggtcatcaacatattgaataaggtgagaagtggaggcgtggaaagaaagtaagtcatgagaaagagcttggctaaagtaatgagggctgtcactgaagccttgtggcggcagtacagcccaggtaagctgctgggactgatgggtgtcagggtcagtccaggtaaaagcaaagagaggctgggatgaggggtgcaggggaatagtgaaaaaagcgtctttaacatcaagaacggaatagtgagttgtggaggaaggtattgaggacaaaagaatgtatgggttgggcaccacaaggtggataggcaaaacaatttggttgataaggcacagatcctgaactaacccgtaagacttgtccggtttttggacaggtaaaatgggggaattgtaaggagagtttataggctttagaagcccatgctgtagcaggcaagtgataacaggcttcagtccccttaaagcctgttgtgggatggaatactggcgttaaagcagggtaagggtgattaggttttaatgggataataatgggtgtgtgattggttgccagggagggagtagaggtgtcccatacttgtgggttaaggtggggggatacaagagaaagacacaaaggaagctttgggttggggagaagggcagcaatgagatgtggttgtagtccagggatagtcagggagcagataattttgttaaaatgtctcaacctaataagggaactgggcaggtggggataactaaaaaggagtgcataaaagaatgttgtccaagttggcaccaaagtttgggagttttaagaggtttagaagcctggccgtcaatagccacaacagttaagggggcaagggaaacaggcccttgaaaagaaggtaatgtggagtgggtagcccccgtatcagttaaaaaggggatggacttaccctccactgtgagttacctgaagctcggcgtctatgatggtccagggggcctctgaggcaatcaggcagcatcagtcttcagccgctaagctgagcagatctgggaaggactcagtcagagagccttgggccagagctctagaggctctgggagtggctgccaggtgagttggacagtccaatttccagtggggtcctgcacagatgggacacagcttaggaggaatcccaggctgtgggcattccttgcaccagtgaccagatttctggcacttgaagcaacatcctgggggaggaggccctggaggaatgcctggccactgcaatttaggcgttttgaagttcttgtgtggtggagatgtggctggggtttctctcacagtgaaggcaagtaattgcaattcagaaatatgttgctgcttggctgcctcttctctattattgtacaccttgaaggcaaggttaattaagtcctgttgtggggtttgagggccggagcctagcttttggagtttctttctagtgtcaggagcagattgagtgataaaatgcatatcgagaataagacggccttctagccctgctgggtccaaggctgtaaagcatctcagggttgctgctaaacaaaccatgagctgggctgggttttcatcctttccttgggtagtttctttaagtttgtcataattaacagatttgtatgctgcctttttaagcccttcaactaggcaagcagtcatataatctcacctagctatacctgggggaatctgcctgatagttccattggggatcttctcggggaactgctctaatgccttcctggaggcctggctcatgaagccggtggttgtcagtgtgagattgggctagagaagaaactctttcctgttcatctggggagagagtagaagttaggatgacatttaaatcactccaggttaaattgtaggacagagttagatattggaattcctgtatatatttagcgggatctgatgagaaagagcctaaatgctggctgatttcagaaagcattcagagaaaaaggcacatgtaccctgactatgccttcagctccagccacctctctaagaggaaatttttgggcaggtggggaagagctagtcatggaacgaaactgtaagccagaccaggtgtgaggaggagaggtgatagaagggttgtagagtgggggagcagaggctgaagaagagttggaacctgattcagcctggcagggagcaacctgaggaggagcagtctggggaggaggtgacaggtcagatgggtcggtagaaaaggaagattcagaagactcagcgatgcttggggttggtactgaagggacaggtgggagggaaagaaggaggatttgggatgagttgcattgggaacagagactagggagggaacaaagtgtgaaaaatgcctggacataaggcacctcagaccacttgtccattttttgaccaaaattatctaggtcttgtaggatggagaaatcaaaaatgccattttctggccatttagagccattatcaagtttgtgctggggccaagtggtattgcagaagaaaataatatgcttaggttttaggtcagacgagagttgaagaggttttaaattcttgagaacacaggctaagggagaagaaggaggaatgtagggtggaaggttgcccatagtgagggaggcaagcccagagaaaagagaggatagagacacagagaggggggtggtacttgccacccaggggaggtggtgcttgctaccccagggaggtggtacttgccaccaaggtgaaggatcaaggcaggcgtccccgtggtgatcagacacctctgaaatgtgggtgaataatcaggcaggcatccgcacagtgattaaacaccgaggtaagactgttttcctgagtccgtgaccagcaccagagttttgggttcatggataaagcacgtctcctctgtctctaccagaaaaagaaaggaaccaaaattaaggaagaaagagattgaagggtggaaggatggtgagagagattggagaagagaatgaaaagaccgcttacccgatttgaaattggtgagatgttccttgggctggctggtctgaggacccgaggtcataggtggatcttctcacagagtgagggcgaggacagggtactggtctcccgaaggagtcctcctgtcccaggtctttggcaccaaatgtcatgcacgtccgtgtgaggagaccaccaaacaggctttgtgtgagcaataaagctttttaatcacctgggtgcaggcgggctaagtccgaaaagagagtcagcaaaaggtggtgggattatcattagttcttataggtttgggatgggtggtggaattaggagcaatgtttttcaggcagggtgtggatcttacaaagtacattcttaagggcggggagaatattacaaagtaccttcttaagggtgggggaatatcacaaagtacattatcacaagggtgggggaggatattaaaaagtaccttgttaaggttgtgggaatatcacaaagtacattatcgcaagggtcggggaggatattacaaagtaccttctcaagggtggggagagtgtgttgtcaaaaagtcaattgatcagttaggatggggcaagaacaaatcacaatggtggaatgtcatcagttaaggcaggaactggctattttcacttctttggatcttcagttgcttcaggccatctggatgtatacgtgcaggtcacagggtatatgatggcttagcttgggctcagaggcctgacagtgtttattcagccttagaaattcctctcaaatggatgtttccttcttcctgagcctactgcctctgcaagagtgggaggcctagcctttccaaacctggactgttgcatcctcctgttcctccacttgacagtcttcctctgcaacccaccgtccatggctggtttccttcctaaaacacacgctgacctttgcctggctccccagagcctagaggagcaatcccagtctcatttaaggagccctcaaggctctgctttttctgacctaacttacctgttgccttgtctcctttttccccaaaatcttcctaccttccctgtacatctgatgctttagccccaaggaccttcttggccttccccaaacaacacaccatctctgctattctctcttcctggaatccccttccctctttttactggaaaactgtaaccataataggtccattgtctgttgtgtacagcaaatcaatacaccaagatactgggatgcagcagagataagagatttaatcatagagttgcccagaaaagagatgagagggaacctcaaatccatctccctgaggagtttggggctagggtttttaagggttttggagtgggccaaagtgtggagaccattgattggtcaaatagtgcagggcgaagtcatgggacagggaactgaagaaactgtattcttatgctaattccatttctttgtgggagtcttcaaactggctggcatcagctattttgctggaatttgggatctgaaaaacatcttaagcgatccttaaaaaaaagccttatgattcaaacgtcagaaatcctctttatagaaacaatgggtatgcaagtggtcaggtgtcttgtgctaggagacttatagcaacaaggaagtgggtcaaagtgcagcctaattaacgcttagttataacaatatttctgtacagaattcttgttaaccatgtgaggatggcgtcaactccttttcctctgtcaacatagcaaaggaaatgccagaacactattggctgtcccaggcagggtaattctgctgctgcaggtccttttccctggctggactgaacctcttgagggcagatagtcacatagtacctggcccatggtggatgctcaagggatgatgaaaggagaggtcacatgttatatgctcccatttttgtgaaatttccagagtaaacaaatgtgtagagacagaaaatagattagtggttgccaggggatagggggaggagggaactggaaggtatgaggtttctttctggggtaatgaaaatagtctggaattagatagtggcgatggttgcccaatattgtgaatatactaaaaacaatggaattgtatactttaaaatggttacaatggtgaattttgtcgtagatgaattttatctgaatgtttttattttaaaaatgttaaataaaatttataggaggccattgattgagactgagctcctgcactaggcccctgtaggccaagccaaaatggaatcccttgtgctaaagtctcacatcaccaaactgaaactaaattgtttatcttaccttgcaaggaatcaggagaaagagagagataacaagcaaatccccaaacaagccagtgttattcctcacgataaggaagtcccctcttctttaaccctgaggaaaggaacctaaagtaacttgatgctaaccaatccactttgtgttcccagtttctgattttctcagccttttctgcctgtaaaaccaacctcctcggctcagctcatcataggaattttctaaattattggaggagatgtcaccccgattcatgaattgtaaacaaaagcaaattcgatcatttaactaaatttgttgtcattttgaattttgtcttttgacagaaatgatgaaaagatgaaggaataataaaatactttttcttattttctaatttgcttttatcccagaccctttttgtcattcttcagctactcccccatgtggaactattataatctaaatgaaagtgtttactcaatcacagaccacatctgaattataatcaaataccaattagcagtcttggattgatggtgtctgttacttttgctgtttgtccttttcctgctgaagtagaaactctgcagggagagaagctgtctagacctggtgggtgtcatctctaatacatccatctgtctaccttgctagagaccaaacttggactaatccctgcaaaagaaaaaccagcaaggagaaaaggcatcattaggaatgtagtttgtgacaaaaatagctcttcagagcttttcacacacacacacgggttcatttattcatcatgaaaaccagtgcggggcaagggggtaccttttgatggggaaaaaaagcttctgacctgccctcactagtgagtgggctgagggggtgagctaggctcttctgacctgttggttatttctgcaggataaggagagagaatgtgttgagctttctctgagtgaggcttgtgcctgttactctcattatttcacgagtagagcccagtctgcctggaacattggaaaacaacaggacatacaagcattgaaggccccactgtggccacttcaggagaaaatggcaaagacaagtcctgattaatgaagtcacctatgacaactccacttcagacaattaactcaagttcccatcttcagctcccggagaactgagacacatcattaactgtaaattatagtgactcctccaccctgaggtgtcctaaacattcttgtgaccagagaattttcagctgataaacttaagatatgatagaaaaaaatggagttggggaaccagttactctatgaaaacttttgtaagtagtttcccatggattaataagaaaatctccgctcatattacacaaagataatttcaaccccattatagacacatgatgttattatttgtggtaagccaacattttcatggcacatgcgatgttgccagtgacagagcaggagcattgccatcttggacaagcactgccattttaaagttccccttgatcaaaaactgcctaaatcaaacccaaagggcatcagcctaatggctaatgtcagtatgaccataaaccacaactgacatctctgaccagaaacattccaaccctaagataaacccctccccgaccaaggacatgccagcgccaagataacctcccctttgaccggagaaatgtcagccccaagacaatctcctctccaaccagagacattccaaccccacaataagcttctcctccacacagaaacattccaagcctgtgataagctccctctccctgaacccttaaatattcttagtctgtcagagagagtgctcctgaccaaaatcagccagaagcccctctcaggtttattctccgaaataaacctatctctgactgttgagctgctttttttgtatttcttgtcttctttctttaattcttacagcaagcactattttaagtgctgttggtaaactaacccatttagtctacacagcaaccctataagtagattactgttatccctttttacatatgaggaaatcgaggcacaggtaatttgcccaaggttacacaactagcaaatggcagagctggaatttgaactcaggccacctgggtccagagtccattcaacaaacagagctcacagggttgtgtggttagtgagatgggcaatccatgcaagcatgcaatttgggccaaaaggctcccagtgcaggacacagcacacagaagtaaatctgtgtttagtaggatttcacagaagagttatttgtgattgtgaaaagctttctgttgtgcagtttttgttttttttttcccccagagaggaaacagattacatggactattttcatatgtttgtgaactggccatttgggccagattaaggggtcaggcattggtggggaagggagtggaagaggtggggtcagcctcattatccagcccttccatcctacagagcactccccaaggctgcattcttcatttgaatgcatttcaaagtgcagcctgattaatgcttaattataacaatatttctgtccagaattcttgttaaccctgtgaggatggcttcaactactcttcctttgtcaacatagcgaaggaaatgccagaacaccattggctctcccaggcagagtgtttctgctgctgcaggtcctattccctggctggactgaacccctggaggccgacactcacacagtgctcagcacattcttcaaatgaagcattcttcatccgcctcctgtgccttcccctggcacactggattcctttcacattcaaaaagacctcacatcacctccctgttctctagagagaagtgccctgtttcttaagcaaagtgctaaacagagatagttaaataaattttcaagtaagtaagagagggcttcggtagttccctaatgtaggggcaagcccaaattattttaaaattgcattggagagactcagcaaattctgagtataagttggatgcctgctgacttgggcccagacaaaagacctagcacccaccttctccctgccccaccccactcccacctcctggcttcccgagaagctcagcagctgtgctagttcatccaggcccaggaactgagtggagaggggggctggggtccctgggatgggtcattcccaactgcagaggacagaagccttctggaataaaagccttctgccaggcatacccctttggtcaatccatcaccaagtctataatcaacactaaagtggtcctaattgtgtgggctcagggagtgctgggaaggaagacctggtgtgggcacagtgatcatggagggaggtcttagaaagagggcttggattcaagtgtgagagaaatggcagctccccatgagggaaggggcatgttttctctttcttaccagctgtattctcctgatccaaaatcattattcatcatcaaaataaaattccagagggccagcttgttctggcatggcaaggacagtcagatgacctgagggggcataatgaggggaaggatcatacagttagtggggctgagacactggtggcattgggacagatgagtggagatcacgcctatgccaaggaactcatcttcccctcgtgctgcagccttcaaaagtatctcagcacaagaagagggagggagaaagaaaagctacactttccagagtcctggagtggacattggctatttcttcccacccagactccattgcccttgaggaacacctcctcccctttctcagcccctctggtttggatgaggcagatcctgtgatgctcacccccaacccttgccacagggtcagaccaggacccaccctggccagttagagcattttacctgcctggcctcagggactggctcaggcaaatgagactcaaattaggggcttttgatgaatccactgggaaaagtgaagctttccttcagtggggatcactagctctagggataatgtctgatggaaggtccagaagccagcacgtggccaagcctgccgagggagcagcattgaaggatggagggagagagaccaagtcctgatgagatccttcaagtgcctagatttggagggcatggaagcccacaaattcatttttttttaaattaaccatcttaaagtgaacaaatctgtgatacctagtacattcacaatgttgtacaaacaccacctctagctccaaaacactttcatcacccccgaataaaaccctgtgctcatttagcggttactccctattctgcctccccccagccctggcaaccaccagcctactttctacttctacgagtttacctgttctggatatttcacataaacggaatcatacaacatgtgatcttttgtgactggcttctttcacttagcataatgttttagaggttcatccaccttatagcatgggtcagtacttcatttgcttgtatggtgtattagtccattctcgggttgctataaagaaatagccaagactgggtaatttataaagaaaagaggtttaagtggctcacggttccacaggctgtacagaaaacatgacgctggcatctgcttggcttctggggaggcctcaggaaacttacagtcatggcagaaggtgaagggggagccaacacttcacgtggccaagcgggagccagagagagtgagggggaggtgctatatacttttaaacaaccagatttcatgagaactcactcactactgtgaggacagtaccaagcagatggtactaaatcattcatgagaaatccaccctcatgactcaatcacctcccaccaggctccacctccaatattggggattacagtttgacatgagatttggcaaggacacagatccaaaccgtatcatatggcttaatattattcctttgtgtggacataccacattatttacttatttagacacagggtctcactctcacccaggctggagcgcagtggggtgatcatagcttgcctaatttaaaaaaacttttctttgtagagacaagggtcttgctatgttgcccaggctggtcttgaactcctggcctcaagcagtcctcctgctttgggctcccaaactgctgggattacaagaataagccactacacctcgccaacataccacattttgtttattcattcatctgttgatggacgtttatgttgtttccacctctgggctattgtgaacagcactgctattagaattcatatacgagtatttgtctgaacacctgttttcacttttggggggtatatatctaggaatggaatttctggatcacgtggtaattctgtgtttaactttttgaagaactgccagactctcacagcatctgagcacaaattccttttttattgtcccatttgactgaacaagatctcgtacatgccaagactgaaacctttactgtcccagggcctccagcagaatgtccctcactagtttggaattgttcctgggctggtgactgtgatggtgcaatccatagcccaggaatgaccacagctaagaagccttgccccaaaacagcccctttgcagctgctgggggaggcctgtctggccagtgactgtcagtcattctgtctgtgccttctgcctggatggcctcccacagagcagtgctgagaggtcactggctggtttgggctgaatttcgggtaggggcaaggctgtgggatggtctgtctctccatagatccaggcctttggatggccttttccacccgtcagcaggtatgggaatgccaagtataggtgctatgctctgaatgtttgtgtccctcaaaattcatgtgttgatatcctaacccccaagttgatagtattaggaggtggggtctttgggaggtcattaagtcacgagggtggagacctcctgaatgggactagtgcccttataaaagaggccccagagagtgaccttgcctcttccaccatgtgagaaggtgccacctatgacaatgggatccctcaccagctaccaaatctgccagtgccttgatcttggacttcccagcctccatgatggtaagaagtaaatttcggttgtgtataagctgcccagtttatggtattttgttatggcagtctgaatagactaagacggtcgggggataaccacggaaagagaaccaaggccaggacacttgtacttcacctaccacctatccagtatatggcattgaggaagtcactttctgtctctgggtttcagtttctcaagtgacaaatgagagggacctattaaatgatgacattgacagtctctggtcctgggtgcatctcactccatcctgctctccagctttccccatctctctgaatcttcataaaagtctaggattttgcagctggcaggggccatggagataatccggaccacctgccctggtgtctcttctcatctctcagagctcgcatgctggccgctgtgtgccaggcagctcctggagggcattcatgatcagcaccagcatcttcctgtggctgtcccagcagataaagcagttattactgatggagggacaatgaggtgtgctcgccacaactggccttaatgatgttggactccgcaggattgccttggctaggcagcttcctgtttaaatgcagggcctggagacaccaatttcgtctacaccaacagcagcattgtaagtgccctcaatgcctgttgcagcagctgtggagtgctgagcaacatttggggtgcattttctgtgtctttcttgtacacacacacacacacacacacacacagagctatcatgaggcttgccctctactacatacacctaagagtgcccctctgtaatatttcatcattttaatcaaatgttcactctttcacaacatgtataagtgtacttggtataccaaaaaatgctatcacagagtaaggtgctttgttattattgctattataattgcccaatccttataaatccaaaagatacaaatgacaacctcctaattgcaatttcaagaggagtctcagtaccaaaactttgatgttcattcacatgggaaatctaatgctcttggactggtattttaaatacaacatgatagaggccaacacttgggccctttctgtgggagtggggcaggctgtggtttgaagaacatcctgttcatgtcatggacccctgctttttgaagggccactcaattgccttattgaaagatgggtgctgtatgatccctggggctccatgccccatccctaggtgtcctctcaaggagccgagattaccatggctattggtgggctgaggggccttgatgacaggcagcaccaagggggcctgggtaatgaagggcagtgagggggtcaaggacctgtgtggagaagacttgggcagtggcgttcctgctttttaagtgctgctgatgttggcaaggggaggaaggcaacggatgaggatgggataggggcaggatgcgatgaaacgacccctaagtagttcctaccccgagatccagggtctgtgagtaaagctctgcagcccctgaggatttgggccatatggtttcatcctgccctgggaggcacccttaggccctcatctctcaagccatctgcatctccccagccaggaaagggtatgtggtcttctctgtagaaggtggcacaaagcaggcacacagtgccacaaaaaggcctcgctcttgattgactcatcaatgctgtgtgacatgtgaggagtgaggatgtgtgcaggagacccctgctcccagcactgtgcttaccccactggcccccaggcattctgccagctgggcagagcaggacagaggcacagagaaggtgaggcgctgtgtgtgtggctgtgtgcatttggggacatccatccatcaatccagtcagaccagggcaggctcttccttgggccccttctgttctgtcccttaggccaggaatatggaatggccaggaatatagactggccagggccaccggaatctgtgctaacgggaaagggctaacagagcctgacagtgagccaggggtctgcacaatggagaactctccactggtactgaccaggaacctgtgttgccctttgacctaggcaaaatagacagctgcctgtgtggtagatagtgaaaatcagaaaagactccagtgccccctcaatgtagttctcctttgtgcctgatatcccctcatcagcagttctcacctttgagttttaatggattcaaatggatatgtttctggagagggggagggtatcacacgtgaagacccttctcttcagcactgtatttctcccatgatagaagggcccttagcccccacccctgctgcccccaaggcctagagcgtggtaggggcagggtgcctcagtgggacagatgtgtagaagtccaaccttcttgacttccttgctttgctgtgagcatcacagcagtgcgcgaaggagggggcaggcaggggaaaggggtaggcttgtgtgaatggctgctgtgaattttaattcaattcagtctggctggcttactgaatcaatgttgggaaaacatagcgctctcctgggaggagaggtgtttggtataaatagaaggtattatcattaagaggcaattaggggacgtcatgtcgctcaatacagcgcaaggcagcagccagagccccagccgtgggctgcagagctacaaggaactgctttcatttacttgtccctggagaaaaagactttcctccattccagggctctctctggtcccttagccccttctctgctggataaattgagccaccttattctcaggggttgctcgatggggtcgtaaccacaccagtgaactaaccatagaaaggggttaccattctccactcaaactctgagcaagagcattgccttccctcacataccaccttactctttctaaacagctttattgaggtacaacttacatagcatacaatttacccatttaaagtatatgatttgtccaggggcggtgactcgcgcctgtaatttcagcactttgggaggctgaggcaggcagatcacctgaggtcagaagtttaagaccagcctggccaacatggtgaaaccgtgtctctactaaaaatacaaaaacttagccaggagtggtggcaggtgcctataatcccagctactcgggaggctgagacaggagagttacttgaacccgggaggtggaggttgcagtgagctgaagtcatgccattgcactctagcctaggcaacaatagtgaaactctgcctcaaaaaaaaaataataataataaataaaaaataaagtgtatgattcaatggtttctagtatattcacagatatatgcaaccatcaccacaattttagaacattatcacccccaaaaagaattttatatcctttagctgtcacctgtccatctccccaacacatgccagtcctaagcaaaaactaatctactttctgtccctacagagacttattctggacattttatgtaaatggaatcatatcatatgtggcctttatgactgccttctttcacttaaacataatgttttcaaggttcatttatgttttggcatgtatcgttaattcctttttatggctaaataatattccactgtatggatatactacgttttgtttatcggttcatcagttactgggcaggcatgtgggttatttctaccttttgactaccatgagcaagtttttgtgtgggcatatttttcctttcccttgggaacatacccaggcgtggaattgctgggtcgtatggtaactccatgtttaatcatttgaggagttccttcttgctctttttaaaaaaactattattttttttttccaggacacagagatgccagagaaatgcggtcagttcttcctcctcctcgttcttaacaacacttattaaataactactactattaactggggacctgctgggcaatcatttagcaagtatctctttagccctttttatgttccaggcactgttctggaagctgggggacagcagaatggtgaatggtgagtcagcgatgttgcttcaccactatgaggactttggcttttaccctgaataggatgcaaataacttggaggtttgttttttctgtacaggtttattgagatataattgacaaaactcaataaactacacacaaagtgtacaatttcatgagttttggtgtgtgtgtatatacacacgaaaccatcaccaccatcaagataatgaacatcttcccccaaaagcttcattgttgtgcttggcgattcctccctcctgcctgtctgtccctacccacctatcttgagtcaaccattgagcaaactacagattagttgcattttctagaatggaatagtatgtggtcttttttagtgtcgcttttaaaatttggcataattgttttgaggtttatccatattgttgcttatattagtagttcatttctttttattgttgactagtagttcattctatggatgtgccgcaatttgtctatccattccccagttgatggacattagggttcttccatgtgggatcttatggcagatgtatgtttaagtttataagaaactatcaaactgttttcctaagtgattgtattattttatactcccaccagcagtatataaaagtactatcgattgcagtttttttccaacacttggaatggcccatcttttaaattgtaaccattctaataggtatgtaatgatatctcatcatgatttaaatttgcatttctcagtgactggtgatgttgagcatcttctcatatgtttgtttgccatctgtttatcttctttaaagaagtgtctgtctaaatcttctgctcttttttttttaagttgggtttcatgttttcttattatcgaattcagagagttctttattaagagtcctctcaacaatgttttgtagtttccagcatgcatctctataggatatctgtgctcccacataccctggtgtggaatcaccgcctcctgggtgggctcaaggcatattgctatggttacccgccaggcacggcggctcacgcctgtaatcccagcactttgggaggccaaggcgggcggatcacctgaggtcgggagttaaagaccagcctgaccaacatggagaaacttcgtctctactgaaaatacaaaattagccaggtgtggtggcgcatgcttgtaatcccagctactcaggaggctgaggcaggagaatcgcttgaacccgggaggcagagtttgtggtgagccgtgatcacgccattgcactctagcctaggtaacaagagtgaaactctgtctcaaaaaaaaaaaaaaaaaatagttacccaattgactgatacagcaagaattttctcctggggccacttgctgggatcatggagatccttattaatacatggtatcagcagctgcctattctccctgccagggagtaccctgtggccaccacagggaatgatgagcctttctggctgccatcctacagacctgcaagagcagcccaagtgccttggagctttatggcatccaattccaagtagcaaggttaaccctataggagaggaatagcttttcctcacccattgctaggttcacagctgaggtcccgataacaaaagatagatcaacaagagatctatcagatcaacaagagaaaagatcaacaagagaaaagtataaaagtatttagtaagttttatgtgaaaccgattacagtttataaggaaatgaagacacaaagaaacagtaaaacctgtggatttttaatgctaggtttgatgaagaagtgaatgacggcggtgaagtatgattggattagaagtatgatctaatgctaacaaactaggggagcttagcaaggcccatttgtttggttcccctctgtgaccctttgtcttcagagatgagaatgttccttacctctcacacgagggtcttctgatccgctgtaggggagggcagaaaaatctttcctagatcagatggcctgcttcaggggagaagaggggaaggtgaaagtgatcttcctacttccactgttttgcaaatgccaagataccatatttgggggtagcatgccctgaaccccatcaagccaatctttcagagagccagctccttcctcccacatggcattgtgcttcctgacatgggcttgtcaatgcagctctgcctgtgtcccctgaatcattttcttggctactactataactttttccaggaacacacccacagatgagaaatagctagaccaatgttgttgatgccaaaagccaagaattagtggtggcagggtgaatctggagcccagaagaacttctgtgaatcttccacggggtgtttctaagattggtctactcccctcccccatgccccattatctcatgctgggttaaaaccatagatgccaggctcatctccttgcctctagactcttatctttaagcattgctgcacagtatgggccagattcattctcttctgttacaataaccatcatcttgcttccctgttcaggaaccatccatggctggggacagcggctcacgcctgtaatcctagcactttgggagtttgaggcaggtggatcacttgaggttaggagttggaaatgagcctgaccaacatggtgaaaccctgcctctactaaaaatacaaaaaaattaaccaggcatggtggcaggcacctgtaatcccagctacttgggaggctgaggtaggagaattgcatgaacctgggaggtggaggttgcagtgagctgagattgcaccattacactccagcctgggtaacagagtaagactccatctcagaaaggaaaaaaaaaaaaaaaaaagaaccatccatgactcctctgtgccctcaggatgagttctaaactcttggcctcatgttcaagaaagcccaacacctggtccttccctgtgtgtcccaaatactctgctccagccagcccagttttcttgcaggccccagcatgctcctacctctaagcatttctcatgtatgccctgtcctgtccctccccacacccacctgcccaaatctcacctctccttaaaggtcagtgcgaatcctagttttctatgaagtgttaccaacaattatggccgacttcaccatcttctgttccttagggttaatcagaggttttattttagaacttgctttcacttttattagttctattagttctttattagttattagttctatttatcagttctattagctcccttttagtgaggctatgctagacacgacacatatacacacacacttgtactttttttgcttggtttatacatgttggttcctcataagagttgttctaactcaaacagcaaaagtctggactcccagaaactctgtttgtagatgccaacatggggattcagagagcccaggtaacttgctcacgtcctacaatgagtgagtgttgtgggtgggctttgagcccatgcccacccccttcctgctctcacatgacctcccatggccctggaggacaggcagggctgagagcctcgagctgcaggggaagagaactgaagcacagagaggttgctcccttcaaggacacatgggagcaaatggcaaccaaacgtggaaagtgggtccattttaaaaagaattatagaaaaacactacataaaatttactattttaacctttttaaatgaataatttggtggcaataagtatactcccaatgtcgtacaacatcctcactatctaattccaaaacattttcatcgctccgaaaggaaacgttgtacccattaagcagtccctccctgttacctcctcccccagcccctcataaccatgaatctgcctgtgtctctgtgtatgtgcccattctggacatctcaaagaagtgaaatcatatgatatgtggccttgtgtttctaggctttttcactgggccctttcattttaatgctgcacttgtggtagctcatctgggttgtagtgaaaaattatgtgtcaagtggctgtatcaaaatggaatgaaccttttctcttgctgatctctcttttgttatagagacctcagctgtgatgttgctcagcctggaatctaggttttctgatgcctattggtgaagaaaatgcatcccactgcctgccccagtgctttaagtttgacccctagccttgaattgcctctatttcatgaggtctatctgtcttcttgcttttcttccagaccctactcccacccgaaacacacagcccctgacacagagctgggcatgtgtgggctctcactagcgctggctgaactgcctgcaccggcagggcatctggcctccttcagcggagagggcccagcaagcaggactccgaccgcctccactactccagctgaattccagcccctgctctcccgtctccaggtcagaacatcagcatttgaacttgagtacttcccccatgcctgtcctgcgggacttggggcttgtactccctctgaggttggaccaccctgaattggggttttccagctagaagaatccctccacagaagcttgaattttccttctgttctctcctttgctctgtacttctcagcaaaaagcatcacctataaatgtgaaggctgattaattctaagtctggggctagtgttaatacagacacagctggcgagatacagaattaaataaacacaaggtcctctgctgactcagcagttggtggaacaggggataagcccttgggcattctagaaagttctgcctgcccagtggtaattttccctttcaggtttcttacctggaaagaaattcccagccactcttgccagcctgtctatttcactaagccagagaacatattttgttgtaagagatttgaacattactttctgctctcaagggacccccctctatcaagtccaattttctgtccctgcctttaccattagagagtctctttggtggagcaaggcagtaccctctctatgcttttttagtgtctggtagaggcagtgccaaggggtggctgggaggatggttagctaccagctccatttcttttttttttttttctttttttgagagagagtctcactctgttgcccaggctgtagtgcagtggcacaatctcggctcactgcaacctccgctgcccgtgttcaagcgattctcctgcctcagcctcccaggtagctgggatcacaggcacctgccaccgtgcctggctaatttttgtagtttttagtagagatggggtttcaccatcttggccaagctggtcttgaactcctgacctcgtgatccacctgcctcagcctcccaaagtgctgggattacaggcatgagccacagcgcccggccgccatttgagaataaaaacactgcactttataatgctagcactgtttccacccaaatctgccatcgtccttcttccaaccaattgccctccctaaatcctttctagatagacattccgtagtcacaccacccctcgtatgaatgagttgatcaggcctttccctttgcgggaggcacagcttgcaggcccattttagttgctgggtctctgcatctcaaattctgggcatgaatatgggtaaatttttcatctgtgtcctacatgcctctgtgcacatgcaacgtgcagactgttcaccccttccaggcagctttcagactttgcttcactgtgatcagcagtgggtataagggatggtgtgcatgtacagatcccaagtacagcattggcttggggtctcatgccctctggcttgttccttaggctttcataggcctacataagtgactgatgtatttcctctctttttttttttcggggtcttgctctattatccaggctggagtgcactggcaccattatagctcactccagccttgaattcctgggctcaagctcctcctgcctcagcttcctgagtagttgggactacaggtgcctggcaccaaggccaccttgtatttcccctcttgccaccttaccctgaatgtgatctgagatccaacagtttctttcctggccattttatttgttcaaattgttaggctgttacaaaagatgctacaatgatcatctttgtgccttccatctgtcattgaagtaacctcaatgggagccatgcagacagggaaggatgttcagaatccagttggatttaaatatattcaagaggtgtggccccgacagattggaagagcataaaaagaattcagaatagtattaagcagtcaatagaggacttttaatgcagaggggaaggatctgggttgctggtgaggggctggttttgtaaactcaaatcaggcttgataattggggaagatataaaaggtaaggaagatataacccagagcacaggctgtgagaccaccccatttggagggtttgaactgggaatcacaaagtttaggcacaacttctacataatcgggctcaagttatttgttgttgtcatgagaaaaattttcctgggtgtctatagctccagatctcatgacccagccaaaaatatggtctatgagcaacccagcctaacaagagggtcatccaatttgcttggaatgttaatcccaatttcttgcaatggtaaaaatatttttttttcttagtgaattagagtctttaacccagaggaagtttacacttaattgtggatataggccaggcttggtggctcacgcctgtaatcccagccctttggaaggccaagacaggtggatcacttgaggccaggagttcaagactagcctggccaacatggtgaaacccctgtctcaactaaaaatacaaaaattagccgggcatggcggcatgttcctgtaatcccagctactcaggaggctgaggcaggagaattgcctgaacccaggaggtagaggttgcagtgggctgagattgagccactgcactccagcctgggtgacagagcaagactccatctcaaaacaaaacaaaacaaaattaattatggatataaaaatgcaaataaaaataataatattactagttttttaaaaattaagtttaggaataatccatgtatatttggtgttcttaaagtgcttgttaagagtaattaataagttagcctcatgagatggtcttttcctacccctcccctacagtgcttaaaacaataacagcattaattttgctctctttacgtagcaaaattgaggcctgcccaatttcaaggggaagagaaataaagccccacttcttcttagggggcaggcaatattgtagtggtcctccagggccatcggcttcccctgacattccccttgagtccctttaggttttcattaaccccttcatcaagatgcttccagcctccattgccacctagtcccaagttgcattctttgggtttcattatggtagtatcccacttccaggtatctaagtctatgtcaagtattaattgctgagcaataaaccatccccaaacatagtagctcaaaacaactaatttttctcatgggtcttcaatttgggggagacttggtggggatagcttatctctgccccacaccatactaactggagcagcttgaaggcaggggcctgggtcctctggaggcgcaatcactcaccgatctggcagctggtcctggctgtggactggagccttagctggggccttagccagcaaatctatacctaccttccccatgtggcctgggcttcctcacaccatggtggctgggttccaagggcatgcgtcctgagagaggcaggtataagcaatatatcctgttatggcctagagtcatgaactacacagcattgcttccagcacattctgcacagaagtagtcacgaaggcccagccaatttcaaaaggagggaaaacagactctgccttttggttgggaagcagcagtgttctagaagaacacgtgggaccaagatgtggccattttgagaaattgtaatctgtcacaattttgtacaggtctgtcatcggctgtgacctaccctggggtggagggtggtggggggtgaatacaaacacccaggtgctttcggctgagaaaaggatctgcagtaactgaaaggttatcttcttaagatagtcactggtatggggtgttcataataaaggcatatagaagttgaggaagagatgctcagaaatactcaagggtaggtttagggcttatgggaagcatcaccagtgtctgctacaggatagtaaaacaaaatactaggcccagcatggtggctcatgcttgtaatcccagcactttgggaggccgaggaaggcagatcacttgaggtcaggagttccagaccagcctggccaacatggcagaaccccgtctctactaaaattacaaaaattagccaggcatggtggtgggcacctgtagtcccagctactcagggggctgaggcaggagaatagcttgaacccagaaggtggaggttgcagtgagctgagatcgcgccactgcactccagcctggaagagagtgagactccatctcaaaaaaaaaaaaaaaaaaatactgttggttcagaagtcaggcccagctgtagtggttcgcatctgtaattccagctctttgggaggcagaggcaagagatcacttgaggccaggagttcaagaccttgctatgcgcaacatagcaagacccagtctctatgaaaaagttttaaaaattagccaggtggtatgcgcctgaaggctaagatgagagaattgcttgatctcaggagtctgaggctgcagagagctatgatcataccattgtactctagcctggatgacagagtgagagcttgattctacaaaaaaaaaaaaaaaaaaaaaagtcagggtgaattatattccctcatgtgatcacagaaggcagagaagagggaacccgacatctcagtctttcaggaaacattaagtgacagaaaatgtgaacctgagatcggcttggtgccctgctataactgagagctggcctgaccccgtgtgtccatctctcaaatctttctggtctcttcccactgaagggatggaccagtggctctccactaaatcatgccatcattttgtcataacttgttttgatccaacatagagtgtaaatcaatcattttgtttttacacatggtcccatatgcacgcaaaataaggaagtctttatccactgaacatattgtttaaataacagctaccaaaatacatttaaagatctttattgggatactaagactgtagcattttgggtatggtgaactagcttctctgagaaaacaataggcaagatcttttttctaagggtgagtgggtggaaggacggaaggtgggcatgaagtagctaaagagcacatgccccagctgttaaagccagggtgtttaatgtattaggtaagacggtgccatggaatagaattttccactataaaatttttcactctataccaaacctagaagtttttctcctactgccaaaacctcacagtaaggtgaggatagacccctccaccatcacagtgtggctttgaggaaggaagtgaggcctcacagagggcagggaaggagtgggagccatttctagacacagaagacatcctttattctaaaaagtggtctcctaaggagtctgccacctccagttctgacatcacagggagatgagcctgccaagctgcctcagtttcctcaatgcaatggtgacgtgactggtctgaagagacacttagtggggaaggaacactcaaggatcacttgtgcttggctgtttaatttgcgaaccacacctcccagcccttgccaggaggactggacaggccatggcgctcacatgatctgacagaaatatccagtgggcatttctagaggtggtcaggctccagcctctttaagcgcccaggtctgtggctgtgacctccatggctagatgctgcctatttctcttctagatcaaggctttcttctcctggtccatctcagaatctttaatggagataatgtaatatacaaagtaccttctttgagaaaattgctcatgtaattcctggcctctgtctccttggaaaaataatgaatggtcccaaaccataagagaaagccattgtacaacctcaacacacatgtctgggcagccctaaggagaaggactgccaacgccggagaaatacagcgactttccattggatttcagggtcatgcttggcccagctgctgtctcttttttcttctctggtggaggccaagggacccttcagatggactctgggatttgttgctacagctgtctcctagagcaatggaaaatgaaccagatttggaaatgcaagacctggggacaggccccaactcccctcttactagctatgtaactggggcaaatcccttagcctctctaagcctgcctacctatcctcacaggctggaggtggaccagatgagatggcatgagaaagagcctgctgggttctaaaactctctgtctgggctgggcgtggtggctcacagctgtaatcccagcattctgggaggccaagctggatggattgcttgaggccaggagtttgagaccatcctggccaacatggtgaaaccctgtctctactaaaaatacaaaaattagccgggcatggtggcacatgcctgcgatcccagctacttgggaggctgaagcatgagagtcacttgaacccaaaaggaggagattcctcctggacaaaataaaactttctgtccatatatagaagatcgtaagtggcactggctcagcacaaggcttcaggttcctcaatttggaacattgaacagatcaggttctgagtcctctgcaggatcttgaagacagaattgactattctcagttgacccctgggcttccctcgggacaggctttatagcctcacccgcttaatgcatccctgaagcctctcaggcacacagcatctcacagcagtgctattgagggtggactgtctgtgggtatgggaattccatatgggtgggtatgatggatccctcctgcaactggccactaacacagaatatagagagctggcttatggaattaacgaagacctcatagaaaagtgaaaattgggatgaaatgccaacatagcgctgggtgctgagatacgatcagtgaactcaaatttgtggctggtttgagctgggcactctccctcttcagctgcccagagctcccacctaccagaacccactctcaggaaaggcctgctgtcagccagtaacttccatctttgatatcagtggaagttacttgacccttctcctgtgggtgtctgcactcccaatgcagaatggaaggcattggtcccaagttgaggaccatcagccctcaactagcatgttagggataatcttttggggcaggaggattgccctggtgtccttaaaattcttccctttctctgtctgagtcaggctggacttggagaaccctgagatctgggctgtgaaacgtctcagggattactttccactttcggatgaaataaacaaatatagagaagtgtcatctcctccaccactataaaaatggggagccacccagccccccagggctcatctgacagctgtaaacaccaccagctgaaacccaggtggtgtgctcagctttctgttgaaagaggcactttagaatgagaccttctcaaggtcaaaggccttgagtccagactgggaaagagcccaatgtgcggtgtgatttcaggggctgggaaggaagcctcctctccccaccaccaaacttgaaaaaaaaaatagttctaatctgatccttgggctgtgtttaaaatgcaaattcccctgggagggtcacagtactttaagtttctggtgatttaccttgcagtgtgaatgagtcccagacctattcttggaagtttttattggaataaccaggtgagctctgaaggatattcaaggacagagttagctacgataatagagtgctgctgggggccgggcaggattagacactaaagtatattttctcatgttggtctcacaataactatgtagagttgggcttatccttattgtataaacgaggaaactgaggcacagacaagcaaattatctaagatcagtcagccaggagtagacacagctgggactggaagccaggtctgcttggccccaaagcagtgaggatctcatgggcctacactcctctaaggcagaggagaggagggtgctgatagtatcagaagggaagaatgggatccaaacagcagatgaaacatcatcaggctgtgagcctcctaatgcacagctccagggcttcaaggagaggctgttccaaaccaccctcaaggccaccatgtgccctgcacagtgggtggtgctctgagtctagaaaggagaaaacctagagcagtggttctcaatcttgggtgttgtcagggagcttgtggacacacacattgctgggccccatccccagaatttctgactcagtaggtccaaagggaagggtcaaatttgcaatttacacaatatcccaggcgatgctaaccctgctgatctggggaccacactttgcaaaccacctgagttagtgcccatctcaaggagtttctctctgttgaggtcaagatatgtaccggtaaccagcagagagatttagtagatgggagtgggggaagctgctgtaataaagagaccctacaataaatcagtggcttaaagaagatcaaagtttctcccttaggtgacagtctgcagtggatgttgtggtgcaccacccagaccctttcttcatccatttccccagctgctgggtgcattggttgttgagggctcttagcttagtccctctctgggaattacccttggaaaaagggggctgcctcacccaagttgtgccccttttgggagcagcctttatccaaaaaggactagtaggtatggcgtaaaaagtttccatccccatgcctcagtctaggacatcttggaagggccatcccaggtctagagctccccactggatcagtgcagggctcttgccaaacttcactgtggttcagtttctcctgccctgccacttacaggtgctcctcctgagagctttccccagcaaacctcttggggagtctgttcctagtcaactgatctaagatacagtcaaagtgagcattactggttggcaggtagctttgctgcccttgatcattgagggacccaagttttttccatcttgttctttatcccttcagctttgtcccaggttgaagccaggttgcaggcccctctgtgctccagctttgtgggaaatggaaagagaatgtagaggaaacacactgtgccttaagacatcggcctggaagtggcacacatcgcttctaccacttcactgtttcttaaaacatagtcacggggctccacacaaggaggctaggaagcacccagcagctgggcagcctggtaggctacgcctgctactttggaagaagagtaaaagagagggtggtgggtggccaggagtctccatggcaacctctgaataagaatttgtgtagccctgagaatctgtaccacaaagctcgttagatagggccgcaggtgtgagccatttactgggcacaaagacccctacagcactgtcattcatgtggacaaaaatttctagagctacttaggcattgctcactagggactctccataaaaagcagcactgcaggttttgcacaatactcttgtgctggccataacttgtcatttcttctccattcaagacagcttagctggacataagtgagacaaagtaacacgacagagataaccttcaacagactcagtcaaagaaaatgattcccaagcttcaatttttttttttattaatcacaaattacttgtaaaagtcttccatctgatcaagacgagtggttgcctgattttgcttgtgccctccccacttgagagcggggcaagcagtgtgggtttgacagtgccgacggggagggctggcttattgcacccggatagggcagacaatccttggctgtcacggaagtcttgtcaaaggcccaagcaaagggtcacatcatactgaccctaccatccccctggcttagagttcacagtccgtctttgttataactttgctgcaaacaccctcaacttgtttgcctccctcccactctgacaagcctttgtctcctccattctgtgcctgagatgccaaacattgctggagagaatcttatatttgggccaattcacttaatgtttattaccctaaacctcaaatgtgcaggcaacaccatggggcagtttttgccttgcatgcctcctcaggaaattcctgcacagcttcccactcagcccccacatccactttccctctccattccagccctttgcaggcgccttgttcttcatggagaaaatagaaagcattagaggagactccttctccaatctctcaccaataccaccagtgcccactgcacctcaccccagtctctagtttctgtctaaggccaacccctcctcttggtctataaatcttatccccaagtcctgagtttacattggcagccctgccggcagactcaatactgagctgtctgctcagcatccgcactgggtgtccagtggcagagggaaagcaagggctgtgctggggagacgagtgatggggaaaagctgtgggaggccacctccaccaggagtgagtgacccactgcctcccaaatacctctgatgggagggttatgcaaagcccccctcaattctactcccaacaggccacactctttggccttggagccgatggcctccctggaggtgacttctaagactggctctcttcccgagcgggtgggagagttggggctaggcttcggtgcttgtccttctctatctcagggggtgccaaattgcctgaggcccaagccgtgccagggaaaatttgctgacaggcctgtgtcccggtgtcccttctggggaagggaagggaggcaccagctgggtgaggagggagtgctctcgcagaggagcccctcccgcctgccctgcctgggggcgccaagagctccaggttctagatcagcagcagaggcatctcagtaagaagctgcctggtgccgggtgaggggcagtctctttactcaccctgctcctggcctgtcctctctccgactccccacactgtccaactggtttgttccttggccagcatctgggagccaatttattcagccctgaggtttgttttgttaaggactttaaaatgtattaagaaatgcgcgaagagctttgtcatcacttttccctttctaacgtacctgagcaattggatcaggaagtccttgcctgcctgtcctcctggcggaccaccagagctagccgaagtcccaaaatggggcaagaaggtagggctgtgtccccttcaagccactcctctggccaaatagcctgggctgtagcaatctgagccaggaggggtgttcatggaggagggtgtgatggctcgtggctgtaatcccagcactttgggaggccaaggtgggtggatcacctgaggtcaggagtttgagaccagcttggccaccatgccgaaaccccatctctactaaaaatacaaaaattacccgggcatggtggtgcatgcctgtaatcccagctactcagtaggctgaggcaggagaatcgcttgaacctggagggcatagacaagaggtgggcccaggtctctcttaggagttctccctgtggctgtggagagaatgcctgatgtttctctcatcttagcccaggcactgaagagagaatgcttgtctcaaaatgagttcagaggcttttatggattcagttgtatctccctccaaagaggtatgttgaagtcctaacccctggtacctcagaatgtcacctcacttggaaatagcattgtcatggatataattagttaagatgaagtcacgttggaggaagggtccctaatttaatgtgagtggtatctatttttttttttttttttggcatggtctcaccgtgtcacccaggctggagtgtagtagtgtgatcatagctcactgcagccttgaactcctgggctcaagggatcctcccatctcagcctcctgagtagctgggactattgtgacctaccatgatgactggctaattttaaaacaatattttttagagatggggtcttgctatgttgtccaggctggtctcaaattcctggctcaagcagtcctccaccttggcctcccaaagtactgggattacagatgtgagctactgtgcccagcctaatgtgactggtatttttaaaagaagaggtcaggctgggcatgatggctcatggctgtaatcccagaactttgggaggccgaggtgggtggatcacctgaggtcaggagtttgagaccagcctggccaccatgccgaaaccccatctctactaaaaatacaaaaattaaccgggcatggtggtgcatgcctgtaatcccaactactcaggaagctgaggcaggagaatcgcttgaacctggggggcggaggttgcagtgagccaagatcgtgccattgcactccagcctgggcaacagagcaagactctgtctcaaaaaataaataaataaataaataaataaataaataaaacaaaataaaataaaagaagaggtcagagtcatgcaggctaaagccagccatttgacagtggaggcagagatggcagcaacacatctctctgtaagccaaggaatgccaaaggcaccagaagccagagaggcaaagaaggattctcccctacaggtttctgagggagcatggccctgtcaacaccgtgacttcagatttctagcctccagaactgggagatgatatatttttgttgctctaagctacccagttgtggtgctttgttacagcagccctagaaaactaatacagagttgaaagcagcttcactccgcagcacccatttaaacaggatttatgtcgtctgtgcacagccagttaatggtccaacacatcctggaggttcatcagtcactccagtcctgaaaagccctcgatggaacctagtcaccatcaggacaaggagggtacctgtgtgtcgagccccactaggatcttgggcagagatcaggcctctggggtcagggtggttaatagacctggaccctaatccaggctttcaatatgtgttctgcaaagccacattaagggccaaccctgggaaatctataagatgcactgtcttactcaaagttaatgtgcttcagattaatgtctcagcaaaacagcaggttattattaaaggtcacaaacctttaaataaaaggttcacaaaccttcagagttgactagagaatatctgactctatgaatgttacatctgtgaatgctgaggctatggcaatgaatgaggtatcctgatacattccagcacatctgcatcctaccctaaatgccctggttggtcctggatgtgcagacctgtcctccttttccatgcgtcatgcttgggggctctgctgcacagctctcatgcacaccaccaaccccatgaaaactcagctctcccaaaaccacacctggctaatctgagaaacaaattcaggtcctcagtaatagtaacacgccccatttgttcacctcctataccctgctccaggcagcattccattttatcctcacaataactctgtgaagtggcctgttatctccttcttacagatgaaaacacagcagctcagagaggttgaggagttgacccaaggtcacacagctggtgatgggcagagctggaaccagccccagtccatgtgactccaaagctgcagctgtctccactctgtcctgatgggagggtcactctgccctcctcccaggagagctgcctacttcccgacagaggccttttacaaaatcataatccttgagaattttaggcaatgtgacgtgccatggttggaaaccattggagaggcaagtccttctagggcagtatttatgcctatgaattcaggaaagtctcaatgctcagttctgggtctatttttagctcctctccatcttgccactggcccaggagtggcctgaaactctgttggcctcctagggcagcactgctgagcagattgggctccatctattgaaatgctcatggcatttgagatgaggtgcttttcccaattaattctaacctgtcagttttgatttttttcctttgaagcccaaataacaacgtgtcacctttctcgacaaaaagccagcattggcgttgacttttctctttgggctagactcatggaaggtgccagaatcagggaactggagcttgtttttgtgtatataggggaaaaaatcttggagttacatagatcatgcaggatctattccatggaaagtaatgcagctattacaatgccaacgtatttattaacatgaaaaggtgtttatactacattgtggagtaacaaaaactgtgtgtagtataatccattttgtatttcttttatctacttatctgttttttttttaatcctaacttttctcccaaattaaacatgtatatcagctcttcaagtgggggaaattttttaaaaaagaaaaggaaaaggaaagaaaatacatacgtgtttaaatttataagtaaatttaaatactacagcaaatttactgttaagtgtggagctgtaacagcaaaccctggccctgaatttcagtggatactggtctctcaatcagttacaataaacttaacatttgaataaatttctgtgcggacccatattctatttatttaaactttttttttttttttccctgagacagtcttgctctgtcgcccaggctggagtgcagtggctcgatcttggctcactgcaacctctgtctcccgggttcaagaggttttcctgcctcagcctcccaagtagctgggattacaggcacctgccaccacacccagctaattttctgtatttttaatagagacggagtttcgccatgttggcctggctgatctcaaactcctgaccttatctggaactctaatctgcccgccttagcctcccaaagtgctgggattacagacatgagccactgcgccaggactcatttaaacatttaaaaattttatttttattgacatataataattgtacatatttatggggtacaatgtgatgttctaatacatgtatacattgtgtaaaattcaaatcagggtaattagcgtatccttcacttcatacatttatcatttctttgtggtacgaacatttgagatccttctagctattttgaaatatacaatacaatattgttaaccatagtcaccctactgtgcaatagaacgccagaacttatttcttctatttaattagttgtttaaatttttaaattttgaatttttgtgggtatataatatgtgtatatatttatggggtacataagatattttgatacatacatgcaatgcattataatcatatcatgggaaatggggtatccatcaactcaagcatttatgctttgtgttacatacaatccaattatacttttagttatttctaaatgtacaattaaattgttatcgactatagtcacactgttttgctgtcaattactaggtcttattcattctaactatttttttctgtacccattaatcatcctgatctatcccctatacccgcaccactagccttcccagcctctagtaaccatccttcccttctctatatccatgagttcaattgttttgatttttagatcccacaaatgagtgacaacatgcaatgcttttttttttctgtacttggagggcttatttcacttaacataatgatctccaattccatgcatattgttgcaaatgacaggattaattctttttttatgactgaatagtactccactgtgtatatgtagcatattttcttcatctattcatctgttgatggacaccaagggtgcttccaaatcttggctattgtgaacagtgcagcaacaaatatgggagtgcaggtatctctttgatatactgatttccttttcattgggtatatacccagcaatgggattgctgtattgtatggtaactctatttttagtttttgggagaacgtccaaactgttctccatagtggtcatactaatttacatttccaccaacagtgcatgagggttcccttttctccacttcctctccagcatgtattactgcctgtcttttggatgaaagctattttaactggtgtgagatgatatctcattgtagtttttttgttttgttttgttttgagacagagtcttactctgttgcccaggctggagtgcagtggcacaatctcagcccactgcaacctccacctcctgggttcaatgattctcctgcctcagcctcccaagtagctgggattataggtgcccaccacgcccagctaatttttgtgtttttagtagagacggggtttcaccatgttggtcttgaactcctgacctcaagtgatctgtcaagtgatctgtctgcctcagcctcccaaagtgctgggtttataggtgtgagccactgcgtccagcctcactgtagctttgatttgcatttctctgatgatcagtgatggggaacaccttttcatatgcctgtttgctattgtatgtcttcttttgagaaatgtctattcaaatcttttgcccatttttttagttagattattagttttttttcctatgaagctgtttaagctccttatatactctggtaattaatacttgtcagatgagtcgtttgcaaatattttcccccattgtgtgggttgtctcttcactttgttgattgtttccttcactatgcagaagctttttaacttgatgtgatcccatttgtccatttttgatttggttgcctatgcttgtggggtattactcaagaaatttttgcccagaccaatgtcctggagagtttccccaatgttttcttgtagtagttttatagtttgaggtcttaaagtctttaattcattttgatttaatttttgtatatggcaagaggttggggttgagtttcagtcttctgcatatagatattcagttttcccagcaccatttattgaagagactgtcttttccccagtatatgttcttggcacctttgttgaaaatgagttcactgtgggtgtgtggatttgtttctgggttctctattctgtttcattggtctatatgtttgtttttatgccagtaccatgctggttaacaaaactctgtagtatagttgaaagtcaggtaatgtgattcccccggatttttgggtttgtttttgtttttgttttttgcttaagatagctttggctattccgggtcttttgtgtggttttttttttctatttctgtgaagaatgtcagtattttgatagggattgcattgaatctgtagagtgctttgggttgtatggacattttaacaatattgattctttcaattcacgaacatgaaatagctttactttttttggtgttcttttcaatttctttcatcagtgttttatagttttcattgtagagatttttcatttctttggttaattcctagctacttaattttatttgtggctactttaatggaattttttttttcatttctttttcagattgttcgttgttggcatatagaaatgctactgatttttgtatgttgattttgtatcctgcaaatttactgaatttgttcacaagttttaatagttttttggcagagtctttaggtttttccaaatataagatcctatcatctgcacataaagatagtttgacttcttcctttccagcctgggtgccctttatttcttcctcttgtctgattgctctagctaggacttccagtactatgttgaataacagtggtgaaagtgggcatccttgtcatgttccagatcttagaggaaaggctttcagtttttccccattcagtatgttattagctgtgagcctgtcccttgtctctaattgtaactttgtactcactgaccaacttttccctgcccctgcctccctcatcccctcccaaacttctagtggtcactattctactgtctacttctatgagatcaacttctttagattccaaatctgagtgagatcatgtgatatgtgtctttctgtgcatggcttatttcacttaatataatgccctctaggttcatccttgttgccatgaatgacaggatttctttcttttctaaggctgaagaatatttcattgtgtatatatatcacattttcttcatccatttatccattgatggacacttaggttggttccatatcttggctattgcgagtagagctgcaatgaacttgggagcacagataactctttgacacactgacttcctttcctttggatatatacccagtagtgggattgctggatcatatggtagttctatttttaattttttgagaaacctccataccgttttccataatggctctactaattaacgttcccaccaacagcgtaggagggttcccctttctccacatttgtatcatttgctgtcttgttttttgatagcagcaattttaacaagtgagagataatacctcactgtgattttgatatgaatttccccaatgattagtgatgtccagcaatttttcctgtaacttttggccatctgtatgtcttcctttgagaaatatctattcaaatcttttatcctatttctaattggaatctattcaatttttacttgattttctctttagaaaaacttaaaacccacagaaaaattgcaagaatggtgtaccattacaatcaatacccaaatttctttcacctagttggattgactaggatcattttgccacatgtgctgtctccatgtggttctatatatgtcacccctcatcacctaacactgtgctgaataaatgaatggctggagtggcagaaaggccagtccttaaagggcaaggggggtcatacagtgggcactatctgaggtccagtgggtagctggaggagaaccagaagcagacagacatcacaggcagagagcagtgtaagcaaaggctcagagggtggccagtgcagaacttcaaggaggatatagatctggccaacaggatgtgagagggaaggtggagatgagcccggaactggggagattcccaaaagtctcagctacaacccaaaagtgacaaagtgtaaggggagtgatatcatttagatctgtgtctccaccaaatctcatgttgagttataatccccagttggaggtgggaccttgtgggaggtgaatggatcatgagggtagagttctgataaaggggttggcaccatcctcttggtgctgttcttataatagtgagttcttgtgagagctggttgtttaaaagtgtgtggcacctctctgcccccctctcttcctctcgctctggccatgtgaactgctggcttccccttccccttctgccatgattgtatgtttcctgaggcctccccagaatcccagcagatgctaccatgtttcctgtatagcttatggaactgtgaaccaattaaacctcttttctttgtaaattacccagtttcaggtatttccttatagcagtgcaagaacagactaataatacagggagccactgaaaggagtaacgtgagcagttttgtgcattttattttattttattttattttattttattttattttattattttattttattttattttttttattttattttgagacagagtctcgctctattgcccaggctggagtgcagaggcgtgatcttggcttattgcaacctccgcctctgggggttcaagcaattctcatgcttcagccttccgagcagctgggatcacaggcaaatgtaaccatgtccagctaatttttgtgtagagatggggtctcagcatgttggccaggctggtcttgaactcctggcctcaagtgatctgcccacctcggcctcccaacgtgctaggattacagatgtgagccaccatgcccagccagttgtgcgcattttaaagatctctctgctaccatgatgaagagggactttcaaggtgcagttggagggatggaagagaagacaagttatggtccaggacaaagacaaggaggcctgaacaggtgagaggggccagaaggatgtagaatgagtagctcttggagtgactgcctgggtgtggtgaggtggggaggattcaggacaactcccagggtctggtcaggaacacgtgactagaggccagtgctgtttctccagatgggcaatacagaggagaagccagtggtgagggagtggggagtgaaggaggcactgacttcagtttttgatgcatggaagctgagtggcctataagacatttaaatggaacacccagcaggcagttgaatctgaatctggatctcggggccaagactggtctggggatggaaatgttggaatcataagagacttatggataggatgaccgccatcctggatggcaggtgcagcccctgttcatgcctatgttccagcatatttattaattgttccctctttcacttttccagtttgagcaatattttgttttgttttgtagagatggggtctcactatggtgcccaggctagtcttgaactcacggccaccttagcctcccaaagtggtaggattacaggcatgagccaccgtgccttgccaagtttgaacaataattaatacagtcaccctaaaaagggtagatcagtcactccctgtattcacctaacacttgccacccctggcctggcatggttctgtgggtgtttcatgctgtatgtggttaatcactagaggtctgtggcctctgttcttgcgtatctcccaccgttcttcccttgctatctttcaggtagatggtgcctaagaaatatttacctgtcccgtggttgagagattcataggccccaacctactgaggggagagaaggtgggagaagctctataagttatcttactggaggctggtggattaaggggcacccttggaccaagtccctactacatatgggatttaggaaatgtagagagaaacagggaatctaaaacattccctgttttcataactggcccgtgctgctccgcttccttcaccccttgcgtgggctgtgacagctggagtgagtttgcaggcctctccctttcagtgcctcctcagaggcagtgtggctgcctggctctgagtgagaccttttggaacccaccctgctgacaagagccacaccctgaccgtccttggacaagccctgtccacctccaccttctgctgttcccctccatgtggcctttgctccagccacattctgaacatatcctgaccatgtttgcctttgggaccagtaaagccctttttccgtaccctcattgcccctactcctatgtctattaaaatctacccacttggctgggcatggtggtgagccaccagcgcatggagcacctgtaatcccagcactttgggaggctgaggtgggtggatcacaaggtcagaagatcgagaacatcttggccaacatggtgaaaccccatctctgctaaaaatacaaaaattagccaggtgtggtggtgcatacctgtaatcccagctacttgggaggctgaggcatggagaatcgcttgaactcgggaggcggaggttgtagtgagctgagattgcaccactgcactccagcctgggcaacaagagcaagactccatcttaaaaaaaaaaaaaaaaaatctacccactcttcagagctgactcaaacatgacctggtgcctaggagactgtcctggattctccctgctggaggcaaggctcccttcatccagaacgccactgtggtccccactgcctccttcatggtttcatctgagttcttgccttacttactgtttggaactcagggtggagacgctttattttacatttttgcatttctccataatgccaaacatgggggtaattatggtgtgtacagacaacatgtggaatgaactgccacatattttgtctccaggtaagagggcagcattaagggttatggagcaggaggtagcagggtgaaggaatttgcattcattcgttcattcattcagcaaatatttattgacagcttctgtgtactagacactatgttccatggtacatttagagaaataaatcttcaaggacctcattatctaaaggagaacaaaaaggagacatgtaaacaaagagtcaccaaacaatgcaataagcaccataaaacagcaaggccaagtgcacagatggaggaacccattctgtctcatggagtctggtagcgtttcaccagaaaagtaacatttaagctgggtcttgaggcatgcctaggaggtcgccaggtatcaaggaaagggtactttttactgtagagggaacaataaaagcaaaagcactgagccccagagaggcttgtgtagtggactggaaggcattcactggggaagaggagaagacaataagcatgagggtaggggaggcaagggaatgccaggagatgaagcaagggagggagaaaggagcctgacattgcaggcagagggcaagttttaaggtgagtgaagtcctggtgaccacagcagcattacaggaattacaggcaagttttcaggtgagtgaagtcctggtgaccacagtggattacaggcatgagccactgtgccttgccaagtttgaacaataattaatacagtcaccctaaaaacggtagatcagtcactccctgtattcacctaacacttacacagagtggaagagagatacggtcctgagcacacagctgctccccacccgcatttacctggggcttccctgaattgtcagtcatgactgccttgctttggattgcagctccctgcagggagctgcccaccttacaccactgagttgctggcagctgccacagaggccagccacctcctcaccgactctcctggacaagcacttctgaggacagagtccttgtcagggctggtttcttggctgaaccctcctttgccaccaacagagagatgcctgcacccctcaagggcaggcagatggctaggcctgccctctcagctgggcagcacactggactggccgtgccctttcaagtgtgcaggagttggcaggagcctgcaagccagtatccaccctcccaggtatccacgcttggcagcctcacttgtctccagcctgtgttcttgcagatgaaactagcagaaggaaggagcttgctgccagttggctccctaattttttttaaatcacaactttgatgtttcctagtctgctgggtgacaccagttgtccttgtttattactgcttagtgctcccaaatggtgttggtcagcatggagtgcagggattgtctccttcttcagaccctagcacttaccagtccctggtccttgctggcctgcctggaggcctgtctcgttgtgaatgtttacacaaatggaaaatgtcagtgtttaatctgtaaagggagcccagattgcaaagctccaaaaagaaacatctaaaggtgagcatccttcctctaggtgtgggacattacaatgtcacatcaactcacatctccacattcacttagcacctctgtgggcaagaggatggggaaggctccctgaacttccagagcttcctaaagaaaaagacaaagttacaacttgtaaaatcccagagtcagtgtcacagtgctgtggctaactgaactgtcaagcagatgcaacttgccccaggcatggacaaaaaaggtttagtgggctgggcacagtggttcacgcctgtaatcccagcattttgagaggccaaggcgggtggatcacctgaggtcaggagttggagaccagcctggccaacacggtgagacccccgtctctactaaaaatacaaaaattagccaggcctggtggtgcatgcctataatcccagatacttgggaggctaaagcagggagaatcgcttgaacctgggaggcagagattgcagtgagctgagatcgcatcactgcacttcagcctgggcgacagagtgagactcagtcttaaaaaaaaaaaaaagttcccgatgagttaggctgggaactggggatggatagcgatggggaatggatggagatgcttccaggaggaaaaggacatgagaggtggtgaggaaatttcatgctagagtaatgatagaaccagaaggctgaggggagagctcaggaacatagatgatgggcaagcctgagggggtgaggagacttgaatacctgtccagtgagttaagcccttctgtgctcaggagaagggaggcaggcacacccagtcctggctttgccactaatcagcctgagccttgggcaagatacttctccctctgggtcagatgaggggggtggatcacagcaaaggttcccaaccaggaggacaggggtgctttacacatgcgcgcgtgcgcgcacacacacacacacacacacgcatgcatctagagctagttctggggtatctctggggatgttccctggacatgtctgggtgtttaaagatgcttggtgcttctggtgtggatcactggctgaagtcatttctaagatcctgttagctctaaaatgaccatgtttctgaggcacgagtagttggtgacatggccggtgtgaagaaatcactggccagcccagcactgtcctttaaaaccagaggctgtggattcacctcatgtgtagacagtgcgacggaatcaccggggtgatgcggataatttcagaacaaagctggtgctgggggctgggggtggagagagcctttgggcctgaatgatccagataattgcagtgctggtgatgccctctcagcatgccccagggtgggtggtgggagcccattagtcatggggtgggctgaggcgaggtggctgaggaacagggaataaataaaaggagtgagcagccatgtctcaagcaggcctgcaagggcgggggtggctgccagtgtcccaggcagggtggctgagacatgagtcacacccggagacgctgacctggcagcacccagcctctctaggagagggaaggaggaggcgggcgctgggagttctgaatgtcaggattgcctcttgctgtatccttgggcttgagatctttgtcatcccttatcaccaccctttgcaaagctacatggtggggacacctctgttcatagctcttctgccactctttatccttaggctatcaaaagctctacttctaccttaagggccatagccactccgttatcattctggaccatagtaaccagagcattctgacctttagagctgccctatgtgaccattctctgttttagacagccggcctggtgtgtgaatgggagggaggaatgagctttgttactaccttctcagcaacctgcttctccccaaggcctcagtttgttcttgctccccttcaagtgtaacccatggcccatacaggagatcgtcttcccagagacgaaggctttcctaatgttcagagaagatccagacccccaacccctggacaacatagacagctcttcaggacgcctgaaaagccagctattgacaaatctgcctaacactctcgcaaactccattttctacagggtgagatgcagacatctttccatgacacctgtggatgctctacaatctggcccaggctgaccatatcctgcctggagggccgggtaagtggggcactcaggcttagaacagccacatgccttcccctccctgtgggacccacttccaagggagccagcctgaggcttgcatcactgtttggtctcctcctacccttccagatcttcctggtgctggagttagtgcccccttttttctcagctgagtcatgaccctcacccagcccagcccagccccctaccctagatctgctcctacacctgattgatgccctggcctcaggcagggctggagcttggggctggtgcctcgggccttcagccttgcccagggcagcctgggcagaagctgagattggatgtcatttgtcaaccttggcagagaagtactgaatgcgtcaaaataattgaaggttatttggtgcctgtgggagggatttttattcccaaggattctgctggaccatttggggcagccctgtttggctagctgagggttcctatgttttccaacaattggatgtttacagtatctgtgctcttgctttttaaaaatgtcctcatttagaatagcttcctttttttatatgttttcctttttatcttttaagtgggaaatgggaggtgagtatgaggggacaattgtgaagcttgcctgtgctccaagttagggacatgagaccccttcacccctggttttcccctgtaatccttccagagctatagagctgagcttgtattcaagccacagacagggcccttgaccttgaaccagacaaggctgacagccccggagcaggagcgctgctgtgaaataactcggagatatcctcccagagcagtgaagaggctggaaggagtcaggaagcctcaaatccccagcctctgacttacaaagcacccagacctccctcaggactagacagagcagccatttcacccagagctgcctccattccagcactgggatgtggttggtaatgtgagattctcactatccaatgccgcaatcagagccatatgcggctatttaaacctcaatttaaatgaattaaaattaaataaagtttaaaaaccagttcctcatccacactagccacattttaagtgctcatgagccacatgtgactggtggctgcctcactggacagcacaggttcagaacacctccgtcatcacagggctctcttggcaggatttatgggtcccctttacgctgagctgtctacccctgttgcctaaatgcctttcctacctaacagtagctgttcagtgggtgcattggccctacagactctcccaagcttctttctccaccagtagaagtagctatgtggccttgtgaggtctcccttctagaaagaacaggtagcatgcctctgacaaccacgttgaccaggtgacctgcaagcatccccaggatcaactagcaacctaagatttgctgcccaaactaatgcttctccctgtccagtggacacttctcaactaggctgcccttctgtgtcactgctgctacttagtcactcgttgactttggaagaagaggcccttcagaggctccaatgaccaagaacattcccttccctactcctcagtgtcacgccccgcctcctcccaagcatcaccatcaccaaaaataaaactgccttggtatccttgctgtagtccatgaagcttctgtattagaattacttggaaggaagaggcttgtttaaaatgcagattttggctgggcgcggtggctcacacctgtaatcccagcactttgggaggcggaggcaggtggatcacctgaggtcaggagtctgagactgctctactaaaaatacaaaaattagccgggtgtggtggcgtgagcctgtagccccagctactcaggaggctgagacaggagaattgcttgaacctgggaggcagaggtttcagtgagccgagatcgcaccactgcactccagcctgggggacagagagagactctgtctcaaaaaaaaaaaaaaaaaaaaaaaaaaaaaaaaggccaatttcttctccccacagcaagccaatggaatcagaatctctgggaggtggagtctactgaatttgagacccactgcaaatgaggaagccacacaggaagcaccttgggagtccttggaaactagaaatcaaccccctttgcattctaaggtctctggtttattgcagaccagctctccccagggctgagagccagatactgggagcttgtggtagtggtgatgtgacagaaatgttccccatggcctcctgttgtcctcctgcccaccccccacctgcacacacacaggtgcatacacatatccacatgcacacactactctctcaggaggtctgctgggaaaccaatacactttcagaaaagcctgttccaaccctggcttcgtggggcatggtgagctcctggccttctctcacaggctcttactggggaggaaagatttctctccctcacccatcactaggtttatggctgaggcacccatagtaaaagacagattaacaagaaaaaagcatacacatttatttaatatctaggtttgacatgacatgggagccttcagaaatgaagacccaaagaaacaggaaaacctgtgtgtttttatgcttaggtttgataaagagtggacagtcgtgcagatgtggacaaagggggtaatacactaatttattactattccaatgataataaactggcgggaacttagcagggcctgttcagaatattctctgtgtccctgtgtcctcagagataagaacattcttttcttgtgggtatagggtgggcacctcatgtaagggtcttatcacctacttcagagcaagatcaaggaattcttttatggcctgctttaggagaagcacggaagagggtcagagaggctttttgtttctgctgcttcctccaatgccaaagtgccatatttgggatagtctgttctgaaccccatcatcctgctgcatgaaccccccatgacctgagtctcctgcctcagagagacctttctttactctaaatcggtgttttgaaatcttttttaacccttgccccactttggtgaacacaaaagtctgtctctgggattttaatatgccactttcttctctcttcatatcctccccaaatatcctgcagtttgtgttacagaaataaggttttctccttattttccaaatataaaattatatgcacacaatacttgaaagagtataaaggtagagtatattgctagaaagaaagtcatactgctagactctagcatgagcctgcatcagaatcacctccagggcttcttaaaatacagattgctgggccctacctctggagtttctcattcagggggtctgggatgcctgggggaaccacactttgagaatcactgctctagaatgatgatacacactccctagggccagaagaaaggccaagcctttaatacaacagacaccagatcatctcatggggctcccgtctctctctgtgctccctccctcttcagcgtgggagcatctacctgggtctcagtaacactgagggcctctcctgggtgaatctctgcattgttatgtagaccaagtctctatcttggcaaatacttcacccacttcagggagaaaggaaagaaagaggtgagaaatgaagaaccctttcttgccagagtgatattgagcacgttttcaaactccacatccggaaggcttaggatatgtacatggggtgtgtgtgtgcgtgtgtgtgtgtgtgtgtgtgtgtatgtgaatgtgcacatgagacacacatatatgttttttgttcctgcgatttctgggcaccatgtgcagtaaccaaagcagaatattcatcctgtgaatctgaacagcattaatgaagaatgtaggtctcctattccagccgggactcagagcggaacaatggcatagcgtgcatatttatttaggccttggcatctcagcaatgaaaaagttcatggaataaatgagcaaaagatggagaacttttctgctctgtgtttataggtttcagctgttcccaaaccatccatcttgagctctcaccgtaaagcaggcaaacagccctttgacgcgcacatcttgaaagttttacactatttattttttcctctgggaaacaatctaggtctctgccactgaggctgtcaggcagtaacagagtgcctgagctcattcaattgtttatgaggctttctctgaaatccttcgccctttcctacggatgggaaaagcaatgaaaaatctcttagcaacaaccgagcagggctcatctgtcctccctgtcctgatgctgcctcctgtttagtatttatcactaaacagggatagtgataaatggctcagctggtccctttctacctggggctggagcattacactcagttcaagaaaggaactttaagaggagaatgacccatatggtgaagagctttaaattatgccttacaaggaaagacagagggaacttggaaggtgtaatctagaggtggacactaccccttgtcatcaaatatccaaagagctgttaggtagaagcaccttgaacttgcttcctgtggctcttaagggaagtcctatgatgttcagggtttgccagggttccctcctctaccaggcattaacgttagcggagactcttttctcttcttcttctctctctaggcaatctcatttcttctcatggctttaaatatcatctttaggctgatgactctcaagtgtatatgcctagcccagatcacttttctaaaatgagagcttggatattcagctgcctactcacgtctccacttgctgtctctctgacatctccaacttcatatgtgtaaaagtgaacccttgatctggaccccctaacccaaatcttatcctcccaccattttccccatctcagtaaatggcaccagcctccacccagttgtcaagtcaggaatctgggtgtcattcctggcatttccttctcattcacacctcacatccaatccatcaccaagttctgtttattccacctccaaaatattcattgagctcctctattcctctccaccttcatatccaccaccctcattgaagctgccatcatctctcatggggactattacaaatgccctctaactactcttcttgcttccatgttacctgccatcctcccatccaacagccagagagacacctgaaaactcaacatctgaccatgtcattcccctgcttaaaacccttcaatgggctgggcacggtggctcatatctgtaatccagcacttaggaaggctgagatgggaggatcatttgagtctaggagctcaagaccagcctgggcaacatagtgagacttcgtctctacaaaaaatgtaaaaacaaaaattcattcaatggtgtctgttgcagttagataaagtccaggctccttctgagatgcacagggtcctgcataatctctcttccctcatctggtaccaccctccccactgctctacacgggagccacactggccttttcagctcttcaaatgtaccgagctccttcctgacacctctgccttgatttgccgtcccccagcgccccctcccctcagtcttttagttctcatctcacatgccatctttccaaagaagccatcaattttagttatcttttgctgcaaaacaaaccatcccaaaacttagtggttaaaaacaacaaccatcttatttcttgtaattctgtgagttgcctggggcttagcgggatggttcttctgctgatcttgcctgtcaggtgttcacagtgagatggcacctggggcagaaacattcaagatggcttcactcacatgtctgccatcatggcaggaacatctcacctggtacactgggatggctgggcctctctgtgtcaccacagggctcactctcccagtggattcttcatatgatctctcccaacaagatgaccacactgatttggggctggaattatcccattaaaaactttgttagaatagagagctgtggatattggatatgtatacttgttagtgtgaataaatggttcccaggagtgaatggtgtagtatactggaaaagaacaaggctttggagtccaaagttcaaatcccatctctaccatgtatgattcttgcttattcattaaggctactttggttactaacaatagaaatggattctggcgaacttaagccaaaaagggtgaatttattagaatgtattagagttcttcagaaaaacagaatccgtaggatggatatatatatatatatatatatatatatatatacagagagagagagagagagagagagagaaagaaagagagagatttaccaggagggattggcacacacaattatgaaggctgagaaatctcacaatctgccatctgtaagctggaggcccaggaacagcagtggtgcaattccagtccaaaccccaaagctggagaactagggagtgggaggggggaggtgaaggggatgggtaggatataagatctggtctgagtcagaaagtccaagaaccaggagcacagatatccaagagcgggaaaacctggatgtctcggctcagacagcaagaaaatatacacttcccctgcttttttattccattcaggccctcagcagatttgattgtgcccacctgcactggcaaggacgatcttccttagtcagtctaccaattcaaatgctaatctcttctggaaacactctcacagacacacccagaaataatgttttaccagctatatcatagaccagtcaagttaacacataaaactaactattacagatcacatggaagggttgacaaccatgactcagcagtaggagccttttttccagagtgttgctactaacctttctcaaccttaatgatttctgtgtctctctctcattctttaaagtcttttttttttttttttttttttttgagacagagattcgctcttgttgccgaggctgaagtgcaatggaacaatctcggctcaccacaaccttcacctcctgggttcaagcaattctcctgcctcagcctcctgagtagctgggattacaggtgcctgccaccacgcccggctaattttgtatttttagtagagacggggtttcaccatgttggtcaggctggtctcgaactcctgacctcaggtgatccacccgcttcagcctcccaaagtgctgggattacaggcgttgagccactgtgcctggcctctaattttaagtcttacattttcatctgtctcaagactgtttgacccagcttggttcaagtatcaaattccttggtcgggccaggcacagtggctcacacctgtaatcccagcactttgggaggccaaagcgggtggatcacctgaggtcaggagttcgagaccagcctggccaacatggtgaaaccccatctctaataaaaatacaaaaattagtcgggcatggtggcgggtgcctgtaatcccaactacttggggggctgaggcaggagaatcacttgaacctgaaaggtggaggttgcagtgagctgagattttgctactgcactccagcctgagcaacaagaacaaaactctgcctcaaaaaaaaaaaaaaaaaaattccttcattggccaaccagctaaggctacagggtacagttacatggtacagggcaggctgccaggggcgccggaggatggggtacacagccaggaaagggaaatcagcgtgaggcaggtggggaacccaagatgggtcaactacactaggtcaagttactggtaagcctcagttttcttacatataaggtaggataatctacttcttaaagttattgtaaggattaatcaaaataatgtcaaaaagtgcctaacacatagtaaacactaagtttatggttaagtgttgttatttttaaaaaacagtgtattttatttattttatattttttaaagagatggggttcttgctgtgttgcccaggctggtctcaaactcctggactcaagcgatcctcccacctcagcttcccaaagtgctgggaaaaataattttaatactggtgaagaactgaatgaactagtaatagcttcaaaacatcatcataatcttaaagaaaggttctgggctcaccttatacttgtcttgatccagccctggaatcagccatttctccaaggagctctcattccttttatgaaaaatggtattcaaaaaccaagacctggtccctagatgtgctcactgctattagggtgtcactgtttccaggtgttcttaggggacagagctggggaacacacatgtgcacacacacatttataatgtataatgtataattatacattataacacataattattatgtataatgtgtgcacacacacattatttggcattgatgggcgttcatttccctccagcagagtaagacagagaagatgcagcctgagtggtttcccttctttaaaaaaaaaaaatctgttggtgaaagctgctttcttgtgtagctttaatttgcatttctcttactgtgagtgagttcgagcatcttttcagagacttaaagctggttgtatttctctttccttgagtggttggtgcacaatctttacccatgtttttattggcttattgttcttttattcttgttattatcgtgatcattgttgatttagaacctctaaatgtgatggcacttagccctatatgagtcataaatatttttcccaattggtcacttatctattgacttttttgaagatagtttgccatgcagatagtctttgttatataatcacatgtaccactgttttatagctttctaggttgttttacaccaacaaaagattactaaaattcatttccttatggtttcttctagtatgtgcttttaaattttgtttatttatacatttagatactggacacatttgaaacgtatactaatccaacttcatttttttcgcagagggcaaccccatatattgaataatttctctttccttcctggtttgaaatgctgcctttcgtgcacgttacattcctataacttctgcatttgggcctatttctgggatttctgttctggtccatggatctctcactttatctcccctatgtctctggccactccttctcagcctccttttctggcccctcctgccttcccctcccctcctctttgtcgcagcgtcccctcctgttctatcaagacacattttccttctctgtcccacgctgatttcatcggcttcagggcttccatatcagcttgggctgaaactaatgtggcatttgtatctctagcctggcaccctctcctgaactacagactcatggagccagtgtcctctcaggggctccacttggaagcttaatctgcattttgaaaatagcacttcctaacccaaactcctgctgctccccagaacctgctgccaccacaacattctcgggaaacagtagctccgttctctctatagctcgagtcagaactccatgtctttgatgactcctctctctctctcttttttttttttttgagacggagtttcactcttgtcacccaggctggagggcaatggcgtagtctcggctcactgcaacctccacttcccaggttcaagcagttctcctgcctcagcctcccgagtagctgggattacaggcacctgccaccatgcctggctaatttttgtatttttagtacagacggggtttcgccacgttggccaggctggtctagaactcctgacctcaggtgatcagccagtcttaggcttccaaaatgttgggattacaggcgtgagccactgcacccagccgactcctctcttctttgcgacatccacgcctattaagtcctgtcagctccattctcaaatagacccagagttgaaccagctccccgtcccatcatctgtctctccccgggctatggaaatagctcctaatccatctttccatggcatccctggtttcaccccctgaccccaggtccactctcctctcatcagccagagcgatgctcttaaaatgtaagtctgatcatgtcctcttctgtgcaaaacctgtagtggttcccaaagtcccacagaagccccaaaagcctacctgacatggtccccagctaactcttggatctttatcctcttccatgaatccactcttgctgggcactccggtcttccttctgttccttgaacacacagcaggactcctgtctctaccaatgcatcttctttgaataactgtatataaacctatcgacttaaacttctataagacttacataagctttagacttatgtagacatagaagttgatcatatatgatacttggacatacatttaaacatgtaagaaaaatgaagctggacacggtgactcacacctgtaatcccagctgtaatctactgaaaatagaaaaattagcccggctggtggtgcgcacctgcaatcccagctgaggttgaggcatgaggaccgcttgagtgtgggaggtggaggttacaacgagctgagattgcaccactgcactccagcctgggtgacagagcaaggctctgctaaaaacaaaaaacaaaaacctaaaaagataagcaaaattgaaattgacggtagtcctaaaatttcctcatattcagagcttatctcttctgaatcttattttgattctgaccattgatgttcttgtttttccaaacaacattgttctctgtgccttcaagagtgctcgtttgatggtacagcattttttaaaagagtgccctactattgcctccaggccttcttccaagcttccaacaatcttggctagtgctgtgtatatggacaggtgaggacaactgcgtcatgactgtcacctcgatgacagggatgtaagacacacctcgatttcagagatgtgtaattgtaaaaacaacaacaacaacaacaaacaggaaacagaatcagtgaattatggtactctctggttgggctaattccctctacttactcttcttttccacaattttttctagttatttttgcttatttttcctttatgagtaaagtcagggaatgttatttgtataaatagatgacaaaaaatggcaaataaataaacaataatagaaggcagaatcagacctaattacttggttaattatttcacgtaccaattctaagtgccttttgcctcagagtggaattaacagataccaggtagtccccctaccctcatcccatgctcttggccaatattgctaattcatcaaggtcctatttttcactgataccagtggaggccttagactctttctcagcgcagcattccaagtggccattaccagttgattagagttggtaaatggaattaaattctccaaagccaacagtcacccaaggcatgtggatatgaaaagtagagaagtctaaatctgttatcagttcttcaacaatgcaggatgcatcactacccttcctttgggacaaatcatatccctgtatcaactgaaggacattaaaggacttccccatcaccacatatacacagctagaccaactgagttcagagccctggactacccataagtcgagtcatgcaagactcctctttagcaaagcagaaaggccagctatttttagttctacagtgttctcttttcccagcctgaagtgttcagcacctccgcttaggctccgattcacattgaagagtaaatgactgctagcccaatcagaccctcccaggagcccaacaccttttcataagcagtgcttctgaatcatctgggcatcttgttgcaatgcagactgtggttgggtaagcccggagttgggcttggtaatgctggttcaaagaccagagaagcaaggtgctaagtatatttgtcagctcataacaaaataccacagtctggtggcttaagcaacagaaatttacttctcacagttatggaggctagaagtccaagaccaaggtgccaacaaggtagtatttattatgatgaggcctctcctcttcgcttgtaggcagccaccatcatgttgtgctctcatatagcctctttcttgtgcaagtgaggagacagagtgaactctggtctcataaggacacgaatcctatcagatcacagccccatctttagaacctcatttaaccttaattacttccttagaggccctatctccaattacagtcaccctgggggttagggcttcaacatatgtatcccagtgggaggacacagtcagtccataactaaggaacagaacactggggagaaaaatcctactttgttgggacactggaaaatgcgagtattctctggacacctacaccagcctctcctcaacacctgaagcaaccaacctggaggattcatcagtgactaaggccagcaatgttgtgttgctggcaggaaagatccattgtctaattatgaatctcagcatcctagaattatggggagaagccagttctcaattcgttttaacagagcttctctctgtagcagttccagccaaataagccaactctgcaggttccaggcaaagaagggtttgttatgggctatatttagtgcccaggtggcaggtgggtatctgccatgctgagcccagcactacatgctcaccactgcagcatgtcaggatgactcccaagggcttttgtggcaacatggaagttcccatggccaggtgcctccccctctaccctggatggctttggaaaacctgcctcaggtgtcactgtgcctttttatgggcaccatgcactggacctactggctttgtaaaggcctgcagaaatgctctggtttgaatgtgtctcccaaaagtcatatgttggaaacttaatccccaatggagcagtgttgagagataaggcctaagggggatgtgtttaggtcacgagggtttctcatgaatggattaatgttgattataaaaagggcttgagctgggtgaggtagctcatgcctgtaatcccagcactttgggaggctgaggcgggcagatcacttgagatcaggagttcgagaccagcctggccaacatggtgaaactctatctctactaaaaatacaaaaattagccaggctggtggcagacgcctgtaatcccagctgctcaggaggctgaggcaggagaattgcttgaacctgggaggcagaggttgcagtgagccaagaacacgccattgcattccagcctgagcgacagagcgagactccatctcaaaaaataataataaaaaaataaaaaataaaaataaataggccgggcacggtggctcacgcctgtaatcccagcactttgggaagccgaggcaggcagatcatgaggtcaggagatcaagaccatcctggctaacacagtgaaaccctgtctctactaaaaatacaaagaattagccaggcgtggtggcgggtgcctgtagtcccagctactcaggaggctgaggcaggagaatggcgtgaacctgggaggcagagcttgcagtgagccaagatcgcgccactgcactccagcctgggtgacagagcgagactccatctcaaaataaataaataaataaaatttaaaaataaataaataaataaaaagggcttgggtctaggggttcactctcttgccttctcttgaccttctgcttttctccatgggatggtgcagaaagaaggcccttgccagatgacagcccctcactcttgaacttcctagccttcagaagcccagagaagatatatagccacttaatcactgtgcattcattcatccaatagtaattgagcacctactctgccctaggcattgggcttagccttggccacacagcagtgagcaacaatggatattctttttttgtttttttttttttctttttgagacagagtttcactcttgttgcctaggctggagtgcaatgacatgatcttggctcactgcaacgtctaccttctgggttcaagtgattctgctacctcagcttcccaagtagctgggattacaggcctgtgccaccacacctggctaattttgtatttttaatagagatggggtttcaccatgtaggtcaggctggtcttgaactcctgacctcaagtgatccacctgccttggcctcccaaagtgttgggattacaggcatgagccaccatgcctggcctaacaatggatattcttaactgcctcgtggggcacacagaagtcaggcacagctgctaagcagatgttaacaggaccacttggaaccagtgggagttgctgagaagtagaggtggggttattggtcacaggaaggggtatgtcttagttcattttgtgctactgtaacagaatgtctgagactgggtaatttataaagaacagagttttattgtaatacaattctggaggctgggaagtccaaggtttaggggcttacatctggcaagtgccttcttgctgcattataacatagcagaaggcatcacgttgcgggtggggaacatccacttccaagatggttcctcacatgcctgccaagttagtgctggttgctgcctagcggcctcagttcatcaccacaagaactccacagggctaagtgtcctcctgacatggtggctatattcctccagaggaggcaatccaagagagcacaaactagaaatcacaatgtctcatatgacctagccttggaattcaattcgcactatgtcatttctgtaacgtcctgttggttacacagatcgactctactcaatgagggagaggcctatacagtggtatgaggaccatgaggtgaggatcactggggggccatcctagaagctggctaccaagggctcaggtgtcatgctctgtatgtaagtatgaattcagaggagggaacagtctctgggataactaggattggtttaatgaaagaggttgacttgctctgtatcctgaagggtaagtagcaactggagagttgtccgtggatgaagggacatcagtccaggagggagcacagcatgagcaaaggcatagaggcagcaacgggcatcgtgaattgtgaatcagagaggagagtggaatggctggagcagcaagtgcacgtagtaaagtaaaggtaataacacaatggagttgggtgacatcaaagttaagagggctttggaagccaggcagtggcgttcagttttgatgggttgttaaggatcaatgatgagtgctacaatggtcatgatgatgaaagtggtgcttcaggaagcataatctagggacagcatatagacacctcagcctggggagagactaaaggcagaggcaggagccttgaccttatgagaagctgaattaagatactggaattaagaatggaaaaggagtggggcgtggtggctcatgcctgtaatcccagcacttcgggaggccaaggcgggctggtcactcaaggccaggaattcaagaccagcctggccaacatgttgaaatcccatctctactaaaactacaaaaatcagctgagcgtggtggtgggtgcctgtagttccagcaactagggagcctgaggcatgagaatcgcttcaacctggaaggtggaggttgcagtgagctgagatcatgtctctgcactccagcgttggtgacaaagttagactctgtctcaaaaaggaaaaaaaaaaaaagaatggaaaaggaggcagagttttaagtgttactacaaatgaagaattgacactacccccaatagactgggacccggaggctgggataagatggattgaaactcactttctccatggtcaaaatggagaagtagcacttgctgtgttcacctcctggaactgagctgagcatcacatgagacaatggctgtgaaaccacttggataggagagaagttttaaacaccaaagggattattgttatatgaatgatccacttgtagatagtacttattttaggactgagggaggtaaggtttggggaagaatagggcatatctgtgaacatgtctgcccagctcctcctccctctaaccttccaacctgatggatctcaaacctaacccaaatcttcccccctttcttagtctttgcccacctttctcccaatgacccagcttcaatctgggcacctgactccaggtatcttagggatctgaaatgttctttttcactctactctactacaagcacacaatagtcagaagactgtgccagggagtgtgtttgccctggctagctctggccagttactgctattggctgcgcagcttgggagactgggtcatgtggggcctgaagctgtaccagaaatggcctagtcaggagacactgacccaactggtgggctctgacctgcagtgtcttaatcttcacatctgtctaatgtcttctggcccactcagttccttgccagaagttaatctgcagtgaaaacaaagctgtctcctcttcactgtgctcacccttcactgtcctgtgttatgctatagactgaatgtttgtttgtgtcccccacaaattcacatgttgaaacctaatccccaaggtgatgctgttgaggtgaggcctttgggaggtgattaggtcatgagggcagagccctcatgaatgaaattggtggccctatagaagagaccccagagagctccctcacctccctccaccatgtgaggacacagtgcaaagacagccgtctatgaactaggttacaggccctcaccagacactgaatatgctggtgccttgatcttggacttcgcaacccctagaactgtgagaaatcaattttattgtttctaagctacgcaggctatggtattctgttacagcagcctgattgggctgagacctgttaaccatgatgagattctggatttatactgccctcgtcatttccaatactttcacaaacattatcatgagggcgtgtatagcaaaggttagcactgttatgcatgggttgaaatcccagcttcccaacttgccaaccaattactttgttctgcaggccttggtctcctcatctatgaaatgggatagcaataagccttacctctgtgagtagctgtgaggattggctgaggctccctggggtgcctggagcgtcatggcaatggggcaaggccctccactcaaagtgcctgtaggctggttggagagatgtgtgaaaagaaaaaagttggcttttttgggctgcctgggcttttgttaataaatttccagtgggacgtttccgcacttgcctttttttagagacatgaagagaggagaattgaaaacatttcctatgttgaaatgaaaggcactatttaatcttgtcaccatctgccttgctccaggctgggagcccacaggcccggctccctgtttcctagcgacagggccgcacacctttcttggtgcagcaaaacgcacaccttccccggtggagaaaaacattccctaggcaactgcagggaaggctcttgcgcagggaactgggaaggagctgccccagaccacaagtgtggcccagccttccctgggcatttttctccaaccaaacaggacaccctattctcccttcccagagccacacggcagcaggggcagcccttaattgatttatgaagtccttgaagtgaccctcagtgccccaagtcccctcttcttcctcagcaaaggttttggggctgccataacaaaataccacagattaggtggctcacaatgacagaaacttattttctctcagccgtggagaccagaggttcaaaattaaggtgtctgcaggtctggttctttccatgcccgtcttctagctcctggtggctccaccaatccttggggctccctagcctgaaggtacatcgttccagtctcctccagcatcacgtgcctttactctctgtgtctcctgtcctgtctctctctctctgtcttttttttttctttttttgagacagtgtctcgccctatcccccaggctggagtgcagtggtgtgatctcggctcactgcaacctctgcctcccgggttcaagagattctcctgcctcagcctcccaagtagctgggattacaggcacatgccaccatgcccagctaatttttgtgtttttagtagaaatggggttttgccatgttggacaggctggtctcaagctcctgtcctaaggtgatccacccgcctcagcctcacaaagtgctgggattacaggtgtaagccactgcacccgtctgtcattggatttagaacccactcaaatccaggctgttcccaccttgagatccttactgcatctgcagagaccctttttctaaatgcaatcacatcctgaggttctggatggatataatttttggaaggaccacgattcaacccactgcaggggctatcattttacctggactcctcctgtctgggagaaaagatttaataagctactgggagagatagtatgtgggatacaccttcatccatggccaaggggtgtatattttgaaagtgggtctcaggacaggggaacaccctaaccaaagaggacgtcacccacttggtagagtattaggtatggtgatattttctggctggtgccttcctggttatcttgctgctcatagagaaccagccatgccctgtgcagctgtgtaaacaggagagggtcaccagcatggttctcctagcggggaggctcctgtgcctctgtctgcttcctgcagggctctgtcgaagcccttcttcctctggggcagggtgccggtcacttgagtgccccaccggtggttctggcccacttggaattgggtgtgtaaggggctctggaaaggactgctgctcttgaccttcccatttgctgacaagacagcagcctgcaaatccaagtgggtccccagttccccaaatatccctcgaactgagggctaaaatctggccatctgaaatccatgtctttttgttcttatttttattttttaaaatgtcatttgcaaaaacaaaacaaaacaaaaccccgaaaacaccccacaaaatgatcacatgtgtttatttttatttgaacaggtattacattcttatagttccagattcaaaaggaacaaaaggatattctgtgaaaattctccctcccactcctgtctctcaaccacctggtttagctctccagaaaccatcaatatttcagctttcagtattttgtattttccagagatatatgtacagtcatatattttcttttccccttcttctctgcataaatgacggctactatacctagttttgtaacttgctgttttcacctcacaatattttcgagggtctttccatatcagccaaacacagcctgaccgtatttgtattaagctgcagaaacatccattgatactccagttgataatctattgctgtgtgagcattacccaatcccctactgatggatacatagactgtttccctatgttccctgcggcaatgaataactatatatgctcaggtcatgcatgtgtgggaataaatctataaggataattgctagaagtggcatatctgggcttcccctcactctgccacagagctttcaggccctggactacatggcacagcttccaaggacccggctggtttattttaagatgatacgtgcttgatagtgcatgaaggtggaaatgtgaaacccactttgatgtggtagttaccattgcggcgcattaacgctgatgtgattcaaaagaccatataatttttatgctgctattaaacctgccacaagctgaagccttgcctggtgcaacgtctgtgtcgaggcacctcagggtggactggtgctggggatggcaagcctgggtcctagctccagctctgctccatgagacagggccaagtcactcacccttcctgagacagtatgttaatcccttgcagagcttactgcaagccatgcccctagtagcaatcacattgcatttattaatagagcagggtggacagatctgtggggcctggccctgcagacccagaaggtggaggagagcttctgtggagctaccaggtacaggtggagagggcaggtgtctgtgaggattttctgcctagagggagatcttggatattgacaacgaacattttccgggtactttacaaagtgctttctcgtacactttctcagttaatgtgagcttccgtcagagtcttcgtttcagcagatttaagcagaaaaagtaatctagaaagtatttgggggtgtgggtagctcacagaattgccgtaaatttgaagcatgaagctcagaaatcaggtgggaaccaagggaagagaaggcagccagaagcacaaatcactccccaggaatgagaaggtgaggaccacacagcttcagacgctggatcttaccatgggcagcctggccacatcccatgctggatacctgtcaacgccagatgacctgtcaccgcaaactgtcatcccgttgccccctcagccacctcgtgggcctaaggggcctcctctgtgcctgcttttttatattactcactccagaattaataaccctcctgcccagatccccaaagtaaggcctggatcatagctggcaccttgactatcagggaggtggaaaaaagtgggtgtccttttcagcctacaatgtgcccataaagagttctagagaaggaatcttcaatcctatggaagttggattggatgtagggcagaaaagggcaactgtctacaaccagcttgcatgaacaccttggagtctgggttattataaacttatcctacttattgaaggatgctgggggagggggctttatatgaatcagggctactgagatctttatatcgggacctctgtgcagctctgtcctgacaacgtcacttattgctcacgattggcataccattaggggattgttggccatcccctcttccctccattctttcctatggggctaaaggcagggaggtgggtctcaagtggatgtgagacctagagcacactcccacatccacttgaaactcatagcccttacactgtcatagtcgtccctttaaaccataaaataatgctctgtttgtttgtcctttgcaaaatatttgctgggaaacaaagaccttcagtagaagcacaagattttaaagagaggaatgaaagatgtagcgaggggaaaagagccaggctgggaggtgcacagttcacgctgcatggttcagcctcagtgccgtgagctctgtgcacgaggacagtgctgagcaaggcatgcctgtgtccccactggacagctgaagagactcaggcagagcatggacagacctagttcagagcctggctgcacatagtaggccctcaatgagaggtgatgatgatggtggtggtgacggcagagcgaggactcactttgtccaacgactacatattacagatgtcaggttcacgactatgccaaaggtcatgttgaggtccagaaggagtgggtggatgagcagaaagaacattcaggggactgtaggcaggtgaatgattttattcagcagcagctcacatcagcagctttctcacactgtctgccttgtctgggctgcttcagctggcagctcccacatacagctgtgtgaccggctctcccctgccttcagggtcagcagcttaactctttcactctctgggcactagggggccaagctgtgtcctggctttccccgtccgtctccaaaaacggacatctctggctctgtctctttctctgggcaccagcgcacctgcacagggtcaacagggcagttgtaccttttacagacaatagtggcatagagccaagtgatgacgttcccacgttatagctacatggctgtgataacaagtggagttatacgcctgcggtctatgctgagtcacgtgggatgtaaacatcctaccttggcctaaccttgaccaaagcacagccatgttccttacaacagataaggaagccaagacacagagcgagggccagcgagctttccggggtgatcagtaggaaggggcaagaaagggttaaatcgtggcccaacacgcttgccactgcagctagatgctgacacaggtgatggtaacaaggccctagaactctaacgggaagatgagtcatcggggggggggtcattaaaatgcaggctctgattcagtaggcctgggggcatttccaaccacacctgggggctgctggtcccaggctgcactttgaggagctgggctctagcagcagtttgcctccctgggagcacattagaatcacttggggagatttcacaaattactgatgcttgagacccgagattctaatttaatttgaggtggttacagggtcagaggtcgtttttaaaggttctcaagtgtgtcttatgtacagtcaagttgagaagggctgtgtgagtggcttgaaaaccattggtcgcctgtgaagagggcttttgagagcacctgcaaggaccgcctctccttccttccagctgctgctttgcttgtggggcaaaggctctcagtccgcagttccagctaagtttaaatatgcaaatacctccgaaatggcaaaggtgagggcttctctgaagcgtggctcctcacagcagggccttccacaatgaagggaaagtgtacacaagtgggctagagcaaggaggtagcctccacgactgcacacttctgctgctggccaagtgacccccagtttaggagatatgacgtttggtgagcacacgtcaggactgacctgattgaggtttgataccagaaggctggagaaggggtgctggcacagaaaagatgcaacgaaggagactccccaggtagtcctgtctctggttccttgagttctacctttccctcaagggcctctctctccagccactgctgccagcatgacattctcccagggggcctggtttccctttaaggttgtggccttaaagtgataatcccaccccagcacacctacagcaggctgtaattatcaagggggttgacataccactcaaatcaaaggcagaaccaaaagaagtaagtactccaaaggaaaggacatggactgaagggctctggtggtcggaggaggtagggaaatacactattctatgtcttcttggaaattgacaaggcccattagcagattcaggttctgggaagtcctgtgggaagtaaacccaatgagctttgttcacactagtgtcgccgagttcatttggccacggaaccctcttatggcagaataactctttatgtctgcaaggcctgctttggaattgtggatctactttcctggaggctcagcaacaagactgctgcccaaatgcctccgatctggaggtgcaggtctggctggaggctgaggtgtggccttcatcacctctcagcagccctgcagcccagagagccctctgtgcccttcttgggggactcaaaaaagtatagggcgcaggaatggagcgtccactccaccgctcttatatctgactgaggtgttaagagtatgagctgtgtcatcagggaccaggcttcaagtcctggctgtactgcttactagctgtgtggccttggacaaacttaactcctctgggcctctgttccctcactggtaaaaaaggaatcgctcctacctcagagtgttgttgtgagaaccaatgagacagcttatataaagtacttagcacactgcctagcagataacagttcataaaatgtttttctaaaatgttttgtttgaccaaagtagttggcatgaaaaaaaaaacttttgttgtgccagtctctccccatgcaatcccacctgtccttggaggccaacgccagtgcgtctcccaggaaagcctttcttgactccctgaccctcacggagtggacccttctctgtgcatttgaccatgctctgccttgctcctgggccatctccctgagggtgaggggccatgctagaggaagtctaggctgcataaatgccgaaacagtggtggatctagcacatgaagagttgagagcctgggaactaggggaggtgtccctccttcttgaactgtggggctgaaggggaactgtcagccttgagtttgcctctgaggtagcccctttcttgctatgaagaaacctgttgtggtcatttgactcattctctgtgtatgcagccctgcatactttggtgttattcctgttgcaaaagtcccgatacttttctccgtcactgatgttttgttttgagacagggtcttgctctgttgcccaggctggagtgcaatggcacaattagctcattgcagccttgacctcctgggttcaagctatcctcccacctcagcctcccaagtagctggtactacaggcgcactccatcatgcctggctaacatatttatattctgtttgtttgtttgttttttagagacagggtctcactctattgcccaggctgatctcgcactcctaggctcaagcaattctcctgccttggcctcccaaagtgatgggattacaggtatgagccactgcacctggcctgtcagtaatttgattattttttaagatcaactggatgaccaggtgctctcagagactacatttttgtagcctgaagtcagtatttatggtttccgtataaggaggctttggagagacactaaaagacaaaagtcaaagccctgaatgctgactgctgtgcactgcctgacgcccctgcaccactgagcgggtgtggaggatgcagggtctccctctgagatcctggcaggaagggaagcttgcctgagtcttgtcttgccagggactctgctctttctggacaatttctcagagctctagaccccttctctggaggaagaccttcattaccaccccagcccacccataccccatcccagggtgaatggaggctggagctggtttcttcttcctctgacagtgtcagctgggtccctgctgcagtgagtactggagctgagcccagtggggtccaggtgtggtctgaggagccatggaggcacagcaaagtcatctccacattccacccagccccttgtggagcaaggcagctctgctcccaccaggcaatcaggcaaagattcactaagtgggatccagcaactcagccacacccagaggcttccatggctcctatattccacagggctgccagggcaccaggggagaaggggaatcctgatctgagacctggccaagctgtgtcatctactgcctgtgtccagacaacataaactgtctgagtccttaggcagggtcttttctgaatgacggttcatcccactgaagtcactcctgagtgagtctcagaatcatgaacagaggaattgtgaaacctggtgactcccagggaggtcaaatgttttgccccaaagcctcagctcgttaagggaactagtggggttggaactcaagtctcccaaacatttgggtctctccctctcactgccgcggactgttgatgaccagaaaggagacactgtttccacacggcccccacttgagagcccacacacaggcaggcattcgtgttagcatagccgcctcccctccagacctggagtccacatgttaggtatgaatacccacatatgtgcacatgtgcacatttctttcttctctgctttcaaacagcagagtttgagaaatggaaaccaaggaactgctttggttcttgattttcactctgtcctcctacccagcctcctacccggcctctaccctcctacctgggcctgcagtaactgctgctggtaacttggggattcccagaagggaaggggttggagcttgtatgtaccttcttcccaggggagaggggaggggtgatgtaggcaacttagaggaaagtaaatgacttggggaaagatggatgagcctaagaagagtaggtgacagccagtgacaaagtctgtcttggtatggtgtctaccccctgtctcctgtcctgtgacatgggccagtattcccctggttgatgagattcctggggaggagactcatgaccatggtgttctggttggaggatctgtcttttggccgataaggggagctcagagaacgcctctgcctgcatctgctgtctcccacgtgcccttggttgcaagcaatcaacataccaaagtggcatattttggggtggcatttcctttcctaaactccctcaaacccaactccaccgtctccccctcctgcctgcctgctccctctaccctgataaaatgatgatgcatttagaagatgaacgattgcctggacccaagtggaactgcagaggacacccctacccagacctccagtcccagcctgacgtcagaggggatccggtcagagagacctagtgccgagaggagcagagagccccgagggaaggctccagggcccaggcaaagcctttttggcactacccctgcaacacacatgggtgccctgaggctgatggcattgtcctctaagagccaggtagatcccttccagcatcttgattggtggctgtcctcaaggggtaactttgtagcctagagcaaggccaggttgtgatagtcctgaaacttcaccattagtgcttctagaggcacatcttcaccccagactgtaaatgcacacccatagtcagacaaaataaggagtgtgccctgaggagacccacacatgttggtagcctttgccttgaggccctggccatatcccatggggctggcaactcggtgtacggctgcaaatggggaggattcagcttgggtcaggcagaagagcatttttttttttttttttttgagacgaagtcttgctctgtcccccaggctggagtgcagtggtgggatctcagctcactgtaatctccacctcctgcctccacctctaattcttgtccttcagcctcctgagtggctggaattacaggtgtgcgccaccacgcccggctaatttttgtatttctagtagagacggggtttcaccatgttggccaggctggtctctaactcccaacctcaggtaatccacccgccacagcgctggccaggaagaatatcatttgattgtacagggttctgtccagcaaggcatgcctctagatttggggtgggggtaaatgttcagtggatccaagagcctcagtgtggggaggtgatgcagaccccatcccccatttaacgatttccctagggctaaccccacgcacaacccagagcatcagatttatatctcagaagttcaacttttactgtacctcaccacacgtggcttgcaggtcatacatcattgccttctgttctgtttccctttgaaaaggtctatcttttcgcttggctgggataactgtctccttatttttgtcaactcctggaactttttttcctgtggctctaactttgccgttgtggcctgacacagaaatgtttcatcttgaaggtctagaaaaagcaatgttttcttctagcataacttgattctgtaatcttggcttttcctgatatgtcggaattgttccatgtaaccaggggacttctcatgctgttactaagagctattatgcccttcctcaaggtactagttttcttgtttacattccttaatgtagtgtatacacatagccctagacacactctgcttgtgtctaattaaattcaagtacctttttcatcaggtttgacttcccagttagctaaacagtcttcccataaggagaagcagtcacagtacaggcggttcttctttacctttttggtaactggcctaaaaaacacacacacagtttttccattttatcaagataattccagcattgtctttattaggttgagtacttagaaaagctgacctgtaaaagggttaaggtttttacatccatgtaactttctgtattgtttttaaggtcttttgatgatcactctggttaaacaaataagtattgttttataatgacctgtgattctgtttttatcaagtgtttggaaacttttgacatctttgataggtttccccagcatcaaaatactaaattaagtctttttggcctagaattaactttggcattttcaagttaggcccctggaaatcttcaaagaatgtatctctcatcctgtagagatattaaatgattagacttatttggtaaattgtatggaatacagattattttttctttttctttttcttttttttttttgagacaaggtgtcattctgtcacccaggctggagtgcaatgccacgatctcggctcactgcaacctctgcctcctggactcaagcgatcctcctacctcaacctcccaagtagctgggaccacagactcatgccaccatgcctggctaaggtaaattgtatgggaggaaattgtcaaatgataattgatgctagatcttctttcagttacatttattgatataaatgttccccaaattatataatgttataaaaatctaaaatgttatcagtcataattttgttatgttaaatcttttctaaagttatatttgtataggtatgttattaatgtgaatattctaatgattatattaaatttatcaaagtcttgacgatcctgatgtgatatggtcagtcataattctggttgttatcttaaaatgctgcacataatagaaataattaaatttctttgtcagttgaacactttcatagatttaaccatggctattttaagttgtcgtcatccacagctattttattttattttattttattttattttattttattttattttattttattttattttattttttgagacagagtctcactgttacctaggctggagtacagtggcacaatctcggctcactgaagcctctgccttctagattcaagagattcttgtgcctcagcctcccgcgtagctaggattagaggcacgtgccaccatgcctggctaatttttgtatttttggtagagacatggtttcaccatgtttgccaggccagtctcaaactagcctcaagtcatctacctgccttggcttcccaaagttctgggattacaggacaggtatgagccaccatgcctggcctgtcattcatgctattgttttaaattcttctctaaaagcatttgcagtgatctatagtcctaaattgattttcatgaagaatactctaatgggtattcctgaatacagatttctgataactttaacatcaatggactaaagaaaaactttcagaacgcccgggcatggtggctcacgcctgtaatcccagcactttgggaggccaaggagggtggatcacctgaggtcaggagttcaagaccagcctggccaacatggtgaaaccctgccttactaaaagaaatacaaaaaaaattagccaggtgtggtggcacgcacctgtaaatctcaggaggctgaggcagaagaatcacttgaacttaggaggtggaggttgcagtgagccaagatcgcgccactgcactccagcctgggcgacagagtgagactctgtctcacacacacacacacacacacacacacacacaaaatcgagaggatatttcctgtcatagttgaagtgtgcactggctttaagttccctgcctctagaccctattttcctgcctcacctcctccaactttccatccacccctgccaaactcttttctttcctattccagaccctcagtcacttgagcttttggctccactgatctcaagggactgagggtcccccaggtcaactctctgaagctgaaaaggaaaagggttaattagaaataactggatattttatccactcagatggtctttggagacattcagacagctgctagagtctcctcagtaattgcctaaaatttagtccacagcctccatatgacctctgataataagcaaataacaccaaaactccttctgggagaaaatatatcctttctccgtgcctttaatatgtaaattttctaccctgtcttctctaggacctaagcagcatctttttgagatgcaaattttggggagaagatgctcagaagaaggtgggggaggggagaaagctatttagaaaccaactggcatttttaaaaatttcaagtctttaccacaagtagtaaaaagctttatccatctgagagagtaatcttaacttattccatctgccagaaacataatttagatccaattactcttttataaactagggagttttatgttacggtacctggcacatggctaaaatttttaaataaaaacttgaagatttctgtttgcatctatctgtttatgtatatctgtgtatgtatagtatgcatatgtggtgttttctctacctctggatggtactgccaaataccaaactcgtattgagtgctcttatgttcatggcaataaagttatttgtacaaattcaattaaaatctgttctccttttaacaagatacaattggtaaaaggccttcactgggatgtcatagttgagaatgatgtgcatagaatcagatttgactagataagttttaagaagctaaggttaaatttgtggactcaataaaaccccttggaaaaaaaaaatcctggtactttgcatgcagggttcttttacatgattcccttacaggtgagtaaggcaagtcacttccggtcagatccaggaacctcaggataatttggggacctcgataagagaggaattcacccagatctatatgtattacagggaaaatctgacggtaagtctataacttggcttcctagcctagagtgacttttaaaattatactctaagattccttatgagaagttctagcaaagcagattttaaaagagcatatatgatcaatctattctttctgtgcttctgtaaataagtaggccaaatacaatgattctaaactgacttttgcaaacaaattagtcttactgtgattatctgtgattgaaataggggttactttagagagaaaaattatgtttcaagagagaattacactgcatcgttattagatttgttaaatcaagtttagcctaaagctgccttattacatatttcaatacacttggtctctaccagagagctccccctttttcctctaaccattggcaactcaaaacccaaaatccaatctcatgacttttgagtttatagtagggtgagaaaacggtatgtgctatcttaccaggcaacaccagaatcctgcttagaaaggaaattgtcttggtttaggaaaatactgttacaaccatctggttatgagaaggtaggccccgaggcaggacctggaaggaagaagctgtagaaagtgagggctgaatttcttttcacaagacatggcagaatgggatggggctgggggaagcatttgctcatgaaaggggaagggcagagagacccagtgacatggcagaagcaggttggcagatgcacagtagagacttttaaacacaagctgtctacgttttaagatgtttgtgtaaatttcctccacttctttcagtacttcagtaaagttttctaaggccaaaatagcctttatttttatgtatttatttatttttgagatgaagtcttgctctgttgcccaggttggagtgcagtggcacgatcttggctcactgcaaccttcacctcccaggttcaagcgattctactgcctcagcctcctgagttgctgggattacgggcgcatgccaccatgcccggctaatgtttgtatttttagtagacaaggggtttcaccatgttggccaggctggtcttgaactcctgaccttaggtgatccacccaccttggcctcccaaagtgctgggattacaggcatgagccaccatgcccggcccaaaagagcctttggtgtgtgcctttttacttttgcttttgcctttatttgttttaagataagccaaggagaggggccaagttctgtggctggcacagggcagggtgagcacatttgggatgaagagatgccttataaactgcatctgtttcggggagcctggaacctgaggtgagtacgacactcagtgtttctctaagtgcttttctgaacactttgctcataacttcgtttaatcctcacaacaatccaatgaggtataggtcattaacctcgttttacagatgaggaacccgaggcacagagaggttacctaacttgcccaagttcacacagatggtgaattagcattccaacccaggcagcctgactccacagtccctattctactcactgagccacactgccccctatcctcagccggtctgcagtgagattataaagtctgccttcttgccaagaatgcaaagaaaactctggacaggaatgggagttcaaggagttcttattgaactctgatggggacagggtgaccccaggtcacacttgggctgtcccttgtcattccattggtccgtgccctcttcccaactcggctggctcctggagggtactatcggtacaatgtgcctttaccaaataatatcataccccacatttgtagtgggatttatactttgtctatggcctttcccatatatgatctaatttaattcacacaatgatagacagaaatcattgtctctatttacagatgaggaaattgaggcttagagaagccgcatggcttgcctgcatcatatagctggtaagtgacagaattctgagctggaacataagaatttttttctttctgttcctctgtgctcctcagtagtttaacttattttaaaacagtaccacatccccctcccctcaagaaactactgtctaattttctttccattttgaaagcacaggccccctttgcaaatggtcttttttttttttttttttttttgagacggagtctcgctctgtcacccaggctggagtgcagtggcacaatctcggctcactgcaagctccgcctcccgggttcacgccattctcctgcctcagcctcccgagtagctgggactacaggtgtctgccaccacactcagctaattttttgtatttttagtagagatggggtttcgccatgttagccaggatggtctggatctcctgaccttgtgatccacccacctcggcctcccaaagtgctgggattacaggcgtgagccagcgcacccggcctgcaaatggtcctgagctggaaatacacagtatcaggattatttcctcagcttcagggcaagactccttgggattcagcattaaccactaatcttgggtttgtccttcctgaaaaagactctggtcacgggataattgttgcacgttcatccccaaggccatttttatataagtgcagagttgacactcaagctctcgctgttctgattaacattgctccttgcaaagaaagaaaaatggccttcgattaacttctgctccagctcagagacagcccagtccaatcaaaagccactttagctaagggagaaaggggtggcacagagcagccatctccctgatcctaattgattttttccttccaatttctcctttatttaagaacctcttcctcagaaatgatagactgatggcattgtcttgtatccagggaccttctcagcaaatgcatccaaggctttgaacaaaggggcagctgtccatctaaatgctgcaggctttcacaatcatgaggtgtaggaaatactacccaaaaatatggcatcttggaaacagaaaaaagcagaaggagaaaggtcactctcaccttcccctgcccttcttgcctgaagactttcatgtgacaattgtcctaccctatacccagaggaaaggaatgtcacacagagatgccacaaagcacctgagcaaacagatcttgctgagttccccccagtttattcccattaggtcatgtccttctgtcttcccatcatgcttctgtatgactgtctattcttcagacctaagcataaatattcacagatttccttgtttcattgggtcttcatttctgaagattcttgtgtcacataaaacttgtattaagcaaatgttttatgcttttctcttattaatctatcttttgttagaggggtttcagctatgaatctatctatgaatgaggaaaatatattactttttctcccttacaaaaaggcacccactcccaagaaactagaatcaggccagtcgcggtggctcatgcctgtaatcccagcactttgggaggccaaggcaggtggatcacttgaggtcaggagtttgagaccagcctggccaacatggtgaaaccctgtctctactaaaaatacaaaaaattagccaggcgtagtggcccacacctgtaatcccagctacttaggaggctgaggcaggagaatcacttgaactcgggaggtggaggttgcagtgagccaagatctgccactgcactctagcctgggcaacagagcaagactccgtctcaaaaaaataaaatcaagcatttcttgagtacccagggcatgcttcaagccatacttgatgccagggaaggcaaagacatggtccctgcccttgaggagctcacaggcaagtataaggggagtgtagcggggatgcagctaatacacaggaagaattgcaaggaaaacagtctggagatcagagaagagagttaatgatggctgtgctgctactggggaggcttttgggaggagtaaaacttcatttgagccttgaagctctcattcattcaacatgagcttccagaacatgccaggccctggggaaatagcagcaaagggaacagataaaaattcctgccatcctggtgtggagagggacaataagaaaactatagagcaaattggaagacattgagtgtggagaagtgaagcaaggcacgacttggggtcaggaagaggttgcagttttagaagaggtatccaaagaaagcctcactgcgaaaacaagttttgaggccaggcgcggtggctcatgcctataatcccagtactttgggaggccgaagcaggcagatcacgaggtcaggagtttgagaccagcctggccagcatggtgaaaccccgtctctactaaaatacaaaaaattagccaggcatggtggtgtgtgcctgtagtcccagctactcaggaggctgaggcaggaggactgcttgaacctggcaggcagaggttgcagtgagctgagatcacaccactgccctccagcctgggtgacagagcgagactccatctaaaacaaaacaacaacaacaacaacaaaaaaaaaaaaaaaaaaaaacagaaaacaagctttatgtcaaagtctgagggaggtaagggagcaggccttgcggatatgttctaggacgaagcaacagaaaggtcaaaggagatgagctggtgtgtgcctggagtttctgagaaatggcaaagttagaggatggactctctcctggccaggggctatgaggaggggaggatctgtttgttttttcaaaggagttcctctgggagcaataccggaagcatctggaaacctccacttcagctacctgggtgtgtgggcagcagagttggctagaaggtgggtgtgggggaggaggggcaaaattatgcagtggtctcagcagccactttgctcttcaagggacactgtgtaagagtcaggagcagaggagaagacaagatcagactttggttttaaagggattactctgtgttacaaacagactagagggggccatgatgaaagcaggcagaaacattgttaccaagcagtgggcttactgcctggcatgcatagaaagccaatgctgccaggtgtggtggctcacgcctgtaatcccagcactttgggaggccaaggcgggtggatcatgaggtcaggagattaagaccatcctggctaacacagtgaaaccccgtctctactaaaagtacaaaaaaaattagccgggtgtggtggcgggctcctgtagtcccagctactcaggaggctgaggcaggagaatggcgtgaacccgggaggtggagcttgcaatgagctgagatcgcaccactgcactccagcctgggcgacagagcaagactccgtctcggaaaaaaaaaaatagaatttgcaggagttctagaacagtatgggcaacatagcgagacactgtctctacaaaataaataaataaataagctgggcatggtagcacagagctgtagtcccagctacttgagaaactgagacgggaggatcccttgagcccaggaggtcaaggctgcaatgaggtatgatggcaccactgcactgtagcctgggtgaagcaaaactccatcccaaaatataaataaataaataaataattaaagccaatgctatggcactggcttctcagaaaagaaaggctttagtgcaaggtggaccagcaaggagacaggagacgcagctcaaatgtgtctctgcgatttgaggtctggggaaagctttaaggagctgatgtgcaagggaaaatattatagacgttgggttggcagggtctgattggagagcttcaaatgtgatcatttatggtaaggtatgtggaggcagatttcagcatcagattttcctggccaatggaccctcacttctgaaagagttttggtgttcaggttctggtcatatatttctggttccataggaagaaaccattggttctaagtgtcgttagaggtcaaagctttttctattgtgcatgcccaagctacatcacttgcagtttgggctgtgttatacctaaaagataactagactgcagttacattaagcacaagagagttggtaagtgcatgcttaatttaaaagaaactgccaaaccatgttccaaagtgactgcacattttgcattcccaacagcaatgtgtgaggggccatttgttccactgtagggactgagggaaagcttctccttcatcctctgaaggtttgctgaaaagcaactgacaaaagacaaatgaatagaagaaaagacagacaaaatttaatgtccatagcacagggaaattgcaagagaatgatgactcaataacccaatggggtacagaggcatatgtaccctttttgatagagtaaggggaggtaagagaaatgtggcaattttggggatagtacatgatagttagaggaatgtaatggccttggagaacatataatggccgaggactaagtttattgggcccgcaaagcagacaatagtttgtgacaaaaatctgttcaggtgtgttgacagacttcagtctctcttcctgagatgtgagttaaattaatgaaaactcagggaagaaaccagaagtaatagttttcttctttggcaggttcagactttaggtagataagggaatagcagagtaaagcttcttccaccatctgctggtctccaagggcctttaattcattaattgttgagagaggacctcactctggcacccaggctggagtgcagtggtgctgtcttggctcactgcaaccttgaccttctgggctccagtgatcctcccacctcagcctcctaagaagctgggagtacaggcacgtgccacaatgcccagccaactttttgtgtatatatatatatatatatatatatatatatatatatatatatatatttttttttttttttttttgatagagacagggttttgccatgttgcccagcctgatctcaaactcctgagctcaagcgatcagcccacctcagcctcccaaagtgctgacattatagccacacgcgcagccattaatataaagtaatctgcaatactacggtgccatattttgggatgaaattccctagtctccttcatttccccagtctgaaacttccctagaagttttgtacactataagttgagttatggttgtggagagagaaatcaggttagtaactgagtggtaaaatatccaattaaaccagtctctcatttctgggaataggccagtccaattaaacagttgtgtctcattttagaaaatggagttgcagatgggatctcaaagctaggcctctatatatgacgcaggcaaatatatccttaataggaggcatttttatggaaacagaagaaaaacaaaggccaatgtctggagtggtctacgaactagtccctctagagtctggaagacagttaggtcagaagaccagtagctagctgacagattttttctagattacagttggcatgtaaattttcttcaaatataagctgttgcattgattctttttcaaaaccaagtttattagcttaggcttgtaaggcctcatgaaaaagacagttttaatttcagtgagtccaagtcagaaaattgggataaaaatttggaaaagttagtttgtagacttatagccaggaaaatattcagggttcagtacaaattgtaggcaaataatgcaaattcaaaaacaatgaacagggctggactcttacaacaggtacactatagttttcttctgaaacatatttttctcctctccagttgtcatttctaccaaatcatagtaagatcaatttctttgcaaaataagtttagtctttggcctgattacatacataagtttagcaagaatagtgatttatcttataggctcttttttttttttttgagatggagtctcactctctcgcataggctggagtgcagtggcgcgatctcagctcactgcaacctccatctcctgggttcaagcgattgtcctgcctcggcctccctagtagctgggactacaggtgtgttccaccaggcccagataatttttgtgtttttagtagagacggggttttgccatgttggccaggctgctcccaaacttctgacctcaggtgatccactcgcatcagcctcccaaagtgttgggattacaggtgtgagccaccatgcctggccaatataggctgtttttaaaagctttgctggaacttttcataaggaatctcagattagactttttaaagcctctcaaggctacgaagccaagccaaggatttgactcatccttagactatgtctgtaacacctgtacaaactggattaatttctctcttcttgagatccccaaaatatcctgaagttcctaggcctgtcagaaagtggcattctttacttaccacagggcaaccatgtgaaccatgtatttaaggtactaggccagtttttccaggaacttctattggcttcataatgccaacctcaattttttaaagctgtttggtcatatctgaaaatatgacattccagtcaaagcttcagtaaaaaagaacaaaaacaaacaacagaatgtctccaatcgtgttgttagaagaacagattattgaacttatacaaataaatttttatagtaaactatattgccttgtacttactatattgccataaaatatgaatactcacaaatagtttccaaattctgaaaaaatcaggcataaagaaacatccggccgggcgcggtggctcacgcctgtaatcccagcactttgggaggccgaggcgggcggatcacgaggtcaggagatcgagaccatcccggctaaaacggtgaaacctcgtctctactaaaaatacaaaaaattagccgggcgtagtggcgggcgcctgtagtcccagctacttgggaggctgaggcaggagaatggcgttaacccgggaggcggagcttgcagtgagccgagatcccgccactgcactccagcctgggcgacagagcgagactctgtctcaaaaaaaaaaaaaaaaagaaacatccatgtttcaattttgttcataaaagtatactttatatggctgggcacggtggctcacccctgtaatcccagcactttgggaggccgaggcaggcggataacgaggtcaggagatcgagaccatcctgactaacacagtgaaaccccttcgttcgggcatggtggcagatgcctgtagtcccagctactcgggaggctgaggcaggagaatggtgtgaacccgggaggcggagcttgcagtgagccaagatcgtaccactacactccagcctgggcagcagagcaagattctgtctcaaaaaaaaaaaaaaaaaaaaaaaaaaaaaagaacaagtatactttatattattcctgtaaagcttaagaggaaaaaaaaaagtttccttaactccggaaaacaaaaagaacaaaacataaaaagaatcagcaatgtttcaaacaaaaaagtcattaaaaatcattttagtccttcatcatttcagtcccatgtgattaattcttttacttcttcttcttcttttttcctttttttttttcgagacggagtcttgctctgtcacccaggctggagtgcagtagtgcgaccttggttcactgcaacctctgcctcccgggttcaagcaattctcctgcctcagcctcccaagtagctcggattacaggcgcctgccaccaccacaccaagctaagttttgtattttcagtagacatggggtttcaccatgttggctaaattggtctccaactcctgacctcgtgatccgcccgcctcggcctctcaaagtgctgggattacaggcgtgagccaccatgcccaggcttcttcttgttttaaatagagacagggtctcactatgttgcccaggctgtctcaaatacctgagctcaagtgatcctcccttctcggcctgccaaagagctggggttacaggcatgagccactgtgctcagctgcatgtaattaattcttgttctatttgtggttaggttagtctaagctttatgagtccagttttgtgggggtttttttcattagcgttatggaaattttcacccagtttaatgataggatctcaaagttgtcagaaacctgtatttgtcagcattctttccatcctttccgtgaacctccttgaagaagcaatacttaaggatttgtaaagagttttcaggggggaaaaaaagcatccaaataaagcttgttgtctatttaactgtggacaacaagattttaaatgctcatggttaaagatatgataaaaattcataataataatcatgcaattgatgaggaaatttggctatttctgtagcaaacaacaatttaacattagaattatgactgatggtacgtactaaaacatagatttctaggaatctcatatgcttttggaacacacattaataacacacctgtacaaggatactcacacctgtacaaggatactcacacctgtacaaggattatttatttgacagtgcttcttgtatgatgcagattgtacttcccagcctcccttgcatcgggggggaagtgaggcaccaaattctagccaatgagatgaggtatttgagccaatagccaatgaggtagttgagagctgttcccaaagcctgctttacagggctgctagctcgtcctctttgacctttctcaatgtcctctccatctggcttgttccacggaacatgaaaaccaccttagaccacaccctaaagatgacagatgccagagctagaaggaccctgagcgcctggcaccatggagtgctctagcagcccccggactgccaacctcccaacttcttgagagagaaagggacataatttctcgttggtttatgccatcactgtttgctgtgttgttgttgttgttgttactctcatctgaactattgttgaacatcatctgaactgatatggggagtggttgcctaacagataaccaacagtgtctgctgttaagagcttcttggaggccaggcatgacggctcatccctgtaatcccaactctctgggaggctgaggtaggaggatcacttgaggccgggatttgaagaccagcctggacaacatagtgagactccatctctacaaaaaaattctaaaaaaaagttagctaggcacggtggtatacgctttcagtcccagctactcaggaggttgaggagcgaggatcaccagagcccagcagatcgaggctgcagtgagccatgattgtgttgctgcactccagcctgggtgacagagtgagaccctgtctggaaaaaaaaaaaaaaagagcttcttggaagagggcacataacttagcctccagatgagtaggatatagagaatcagggaccagaacagtgaacattctagagtgaggcaggataagaagtgagcctggcttagaggcccagattgcagagggttagtggggccagattgtaggaagactttgaccattccattgagacgtgtgctggtccttctaagccaggagaatctggactattttgaatggcccctggagaaagctcatccctgtgtttaacttaaatgtaccatgtttcagtttgaatctctcttgccttattcacagtggatcaagcctggcttcaccacaggaaagctgagcctctatgttcccttcaacattattaaatgtcaccctctatcaccacacagacaggaaaagcccatttcttaaaatgattaaagcctcagtcttaacctgtcacatctagtactcaagatatgggattgtcatcccaaacatccaaatcccagaccagactgaaggaactggcaagggcaggagcccatctccttccttagcacctggccaaggcctggccagagctgggctcttccttgttgagcaacgccttcctcccttccatctcccttcactctgcaccagaggagccaggaactagacccaaccccctccggcagctgagcctagctggacacatggcagaactgtccagaggggagttcatgtcctgtcctccctcctgcttctcagaagcctccctgatatcaattatctgagaggcaagaccataaaccactggaacagccagtcccagagtcaagagaacatcttcactcttctgagctgcccaggcccccaggcccagctgccaaggattttctgcaccttgaagtgcaaaacaaacaagtgttactgttttcatgtgaactacctcaatgcactctgctggccttgcactggggctttgtaggtgtatgactgggggaaaaaagacagagctttttccctgaggtcaatcaatgtgctctggacactggccaaggatgcctggtagctggttctgttcagttgcagggaggcagtgagggcagatggggaagaaggaaggagggtgggatgggggtgctattctccacctagggatctgcaggtcactgccctgagcaccattcccagccttttcccaccaaggacacctgggaagattttatctagaaggcaaactggatttttttctaataatcaatttgcttccaagttttccttacctagaagccattctagtcaccaagccagcttcaggtgagtatgaaatgaacaaggttgttacacaggtgatgtaattccagctcaaagtaaagaggctggggcttcagttcgcaggacagcctcatcctggggaatgttaagatttcatttaggctttatggaatactgaaagtatctatctggtgggaaataaaaataaaatcctcagtcccccaaccgaatgaacgaaccccctcttggccaaggagatggcagagaaaccttgaaaactgagttcctggccatggcagcatggggggctggacacgcctcgttataccccctccctcactactgccattaggctttcttccctaagggttcaacagaaaccagcccttttgaaagactcactccactgctgatttcaaccagccacatgactgccctctcttttgcagtttccacgcaatgggccagaattccttcctgataagagaccactaaccacaaagtggtgttggccatctatggacgctgcagacagggttttcgtgtcctctgcttcaccttttgacatcagaaagtggaaaactccaccctgagatcatgctaaccctactgttttttgtacatgtgacccatgaaggggcatgaagctcagttatgcatgtgtaggtttctccattcataaatgttcatcactcctcttgtagcttattaaatatgtatattcaaccaccctgctcagcataaatttctgctccctttacccctcccttaaagtgcctgtttctggcttctggccagaggctacagttcccagcccatcagaatggccaccctgcatgctgcagctctttataagaaacaaagctctgctttccaaatttatgaaccttgtcattcttcagtggacaccggcaacatcccctccattcccaccctgactcttgcctaggttgagaaccggggccttaactccaagaaatgactttaggccaggtgcattagctcacacctgtaatcccaggactttgggaggcccagacaggaggattgcttgaacccagaagttcaagatgagcctgggcaacatggtgaaaccctgtctctacaaaaaaaaaatccaaaaaattagctgggtgtggtggtgtgcacctgtggtcccagctacttgggaggctgaggtgggagaatcacttgagcctgggcaagagagtgagaacttgtctcaaaaaaaaaaaaaaaaaaaagaaagaaaaagaaagaaaagaaaagaaaagaaaaaaaagaaatgactttgtactgcagccctttgagcaagtgtttcagtctgtcattcagagcatcccagggtaccccgatcatctgcagtgtctcagggtgagtcctgacctagggtgtcacattcctagaaattccagcaagctcttcctacacccaatggatagtgggaaaagcagggtatgtgtttgcagtggagtgtggaaagggggagggggctttggtatcttgagaaagctaatttcataactaattaaatcagaaaagatgtggaaaatcctagcaccaatttccaatcctcttcacaacattcctcataccttcagatggcacaaagtgttgttttatacaaagaggagaatagtaggtgttctgagactttctccatctctgagaggtactaagtatgcttgggtttcaagttcttctccctcccttacttactgtgtgatcttgggcacattactcagcctctcaggaccttatttacttacctgaaaaacagtgttgttctgaacatcaaatgaaaaattcacatagagcatttagtgtctgtgacatataataagcattcaaggcatggtaactcttactatctcatttatcacaaataatattctctgcctttattatcctctcctcccacccccatctcctcccaagaggctgacatgtgactcctggtctgccaggagcaatgccttccctgctggagctcccggagggcagggagatgtcccctctttcctctgtgccacccatccccatttctccacaccatgccagtgctggactcaacttgatgaggactccctgaccgctgatgtattatctaacagcatcaaacttgggagattttcctgcaggaacccttgaatctgttgtcagtttgaaggaggcaagcaattccaactgagaaaagtcacccagggaaagggtgtaaagggggcaagacttttgggagggcatcacatctccatctggtgcttcatttcctaggcctgaaattcattgcttgtgtacccagaagtgatcagtctctacagatcatctcacatagccaagctcacaaagattgacaggtgagacaagcacatggaaagccaaatggtcaccagaggttgcttggtgggtgttagactctgggtaggtaaagagtgtttgatgatcctaatggctgaaatcagcagagagctcaatataaggcctctatattgcagcattccagggggtgccattctcatggttgatgatgaaaagagagccccttcctgtggagttgttcagtgcacacagcccttcccagaccccagtcctgagaaaacaagaaattcaaaatctaagctgttggaagaataaattattgtgagctttaaagaatgattaaaagcctgagtcccatgacaggcagctataacctaggcagttgcaaactttattttctctgattatggattaagccttcttccttgcctacattgttttgtaaaatgctgtaaatggctgaagggtgccagggaagaccccttttctcttactgttgactttcttttcttttcctttctttcttcctttttttttttttttttttttggttgactttcattatcaatctccctcttacctttctcacacaaagacttcatagctaccacattttaagatggaatgttaaatatacccttttgagttggaaagaaaatgaaaactagatgtaaaaaaaaaaaaaaagaaagaaaacaggccatagtgagggaaaccatactgtaactaactagttagttcattgtaactcttaagccaaccttgcattgaaaacattgtaatcctattaaacttctttgttgcagtggctcacgcctgtaatcccagcactttgggaggatgaggcaggaggatcatctgaattcaggagttcgagaccagcctggccaacatggtgaaaccccgtttctactaaaaatacaaaaattagcctggtgtggtggtgggtacctgtaatcccagctactggggaggctgagacatgagaatctcttgaacctgggaggcgaaggtttcagtgagctgagatcgcgccactgcacttcagcctaggtgacagagcaagaccctgtctcaaaaaaaaaaaaaaaaaatgctcttcattgaatactcctgatatgtcaaggaagatgcaacctgagaactgagcgaaacttagcaacatggagggcgttggcaagctcaaaattcagtggagggggtataaacctgattggaaggttcaaaagaaaatggacggagaggaatcaatgagaaaaatggggtagcagttgaagggggatatggatcaagagagaaaagcaactttttttagctgagaaattatatttataatatttgttagaacatattattttcataatatttgtatgttatggagagtgatccagtaaagaagaaagtatgctgatgtagggaggaggaaccattgctgagttcttgaattgatgggcagagcagggtctcaggcacaagtggaaagggaagattaactttatgaaaacggaggcagttcatctatagtaatagccaggaaggcagaggtcatggcactgatgcaggtaggtgggtaactgaagtgatgagagagtctgaagatgttcttacttcaattttcttggcaaaatagaaaggtatgtacatacatgcatgttcatgtatgtttatgtaagcaaacaccaggagtctagtctatagtagcatctggctacttaggtgagcatgacagtgaggagagagatccataaagtgactgcctacagagctggctgcactccaggaatcagccatcaaagacggggaagggtccgaccaggcaggacagaacactttcagtggtgatcctgcatgggagggacagcagcaagcaacccttctctgtgaggactgacccctgggagtgagtgggctgtggaactcatcgcaaaagggtgggatcttcaggagaactctgaaatatcagtttgaatattaaaagagaagtgtccttattttgttacccaaaatgacaaatcagaatatcttggttatacttatttccatattctctgggtattttgaagataactgaagtatgtacttaacaccttagcaagtacctgggttacggtaagtgtctggtaactcacagccattgtggtgatgataatatcattggatgcccattcatccacaatggttgatcctgggggtgagggactgtcttattttccatcatagcatagtccctgacacttgaaaggaaagcaacatttgttaaattgataaacaaaaatgattgaatccctgtgatctacagtggtctgggaacgcatcatagaggaagtaagctggaccttaaaaaattaattttcctgctttctatttccatatgttatctactctagggtgagggttcaaccctttgggtttcatttactttgtttattttttatttatttagtttttgagactgagtctcactctttcacccaggctggagtgcagtggcacgatctaggctcactgcaacctccacctcctgggttcaagcaattcttctgcctcagcctcccgagtagctgggattacagatgtccaccaccacacttggttaattttttgtatttttagtagagatggggtttcaccatgttggccaggctggtctcaaactcctgacctcaggtgatccgcccgccttggcttcccaaagtggtattacagacatgagccactgtgcccagccaggtttcatttacgttagttgtaaagtagtgatccttgctcctgagattggggccatctgaaggcatatgtccttagaggtctctgagggctttctgaaggaagcagtggatgcatctctcagctccaggtctgatgttccctgaacaacacttgtgaacatttactgtggttttggggatcgctacctgggtgttgacagcagctgtacgtcggggcctcagccctaaatgttcggttgttacttcaaatccatcaaaatgtcagggttttcaggaaagccactgagatgccatttcaaaggcttcagtgggaatgtgcctttctttcacttgccaaactgttaaagcattagcttgttcaagttgcaaggcccttaaaaccatccatggatttcatggtgtgtttctggtggttggtgtcagtcctatattctcctgttactgtattgctgctccccactttccacccttacaagccaccacaatctgtaccagcagctcaaaatgtatgtcatcacttgagagatgacagggctgtgaggttcttacaaatcatctaggcctcattctctccatctgttatcacccgatgggtttgtcctgcccactgcacagatgaaaccaattcacagagaccatagcatttcagtaaagagtttaattaatgtaaggccaccaagtggcaggactggaattattactcaaatcagtctccccaagaactcagaggccagagattttatggaaaattttgtggccatagggctagggaatgctgctgattggctggaaattaaatatcagagaagtgaggaaaatggtccccatatgttgcatctgcctctgggtgggggccacaggaccagttgagttatgagtcacaggtccaggtgtggtcagtctgttaccagaatgcaaaagtctggaaaacatctcaaaagaccaattttaggaccaggcatggtggctcacacctgtaatcccagcactttgactgcttgaggccaggaggatcgcttgaggccaggaggatcgcttgaggccaggagtttgagaccagcctgggcaatactgcaaaactcctcttcaccaaaagaaaaaataaaaataaaaataagctgggtgcagatctgcaagtctgtagtcctagctactcgggaggctgaggcaggaagatcacttgagcccaggagttcgaagctgcagtgagctatgatggtgacactgtactccagcctgggagatggagcaagaccatgtctcttaaagagagagagaaagagagagagaggaagaaaatcagagctagatgatagagcagtaaaaacagattgtatctaggactattacaatgcaggaaagatacctcagtatagaactgggctgaattccaaatacaacatgaacaactggagatttatagctaaagagcagagtaggaggtcagtggatcaaaaattactaagagaaaataacaagagtcaagggaggctgggcgcggtggctcacgcctgtaatcacagcactttgggaggccgaggcaggcagatcacctgagtttgagaccagcctggccaacatggtgaaaccccgtccctactaaaaaaataaaaattagctgggcgtggtgacgggcacctgtaatcccagctactcaggaggctgaggcaggagaatggtttgaatctgagaggcagaggctgcagtgattgcaccattgcactccagcctgggtgacaagagggaaattctgtatcaaaaaaaaaaaaaagagtcaaggggattctggttaaaaagaccttacaggattcttgatggagaccgaccagggtgaccagatgtcacctggggagtggtggagaatgggaaatgtggtcagatatggagggtaggggttctggctaaaccaatttagcaggactcttgctaaaactgggcaaggcaaagatggacagggaagcccaatggttgaagactagttgagaagacagctcagaagagcctgactagcccaagcacggtggctcacgcctgtaatctcagcacttggggaggccaaggcgggcagatcacctgagctcaggagttcgagaccagcctggccaacacggtgaaaccccatctctactaaaaatacaaaatattagctgggcatggtggcgcatgcctgtagtccgagctactcgggaggctgaggcaggagaattgcttgaacccggcaggtggaggttgcagtgagccaagatcgtgccattgccctccagcctgggtgacaaagccaaagccagactccatctcaaaaaaaaaaaaaaaaaaaaaaaagagcctgactgactaaagtttggtcaagtagaaagtctttgttaaggtagaggggagggaagtgagtaaggctgtaaaaggacaagatgaggcatccttgtggtgatgaacttgctctgcatcttgactgtatcaaggtcaaacctggttgtgatcatgcattacagttgtgtgaaatgttattgttagaagaaactgagtaaaggatacacagggtctctattatttcttataagtgcatgtgaatctataattacctcaaattatgaagttacttaaaagcagcatttgagaagttgggtatttataggcaatttaataaagaaacattaaaataagattgcatatatattttatatatatatatgttaataccctatagaacagtaaattgaaagctttggggttatcttttattgtatacataaatcacatgcatttctgtaacactcaaatcttcaggttaatatgctacttcacagaatctgagccgttaatagtaaatagcaaaaccaaacaaaggcataccatattcaccttaataaaataatgcttaaaagtacaggtagtgaatagaaaaaaaaaacaccaaaaaaaaaaagcatttaaaaaaccccaagcaggccgggcgcgatggctcacgcgtgtaatcccaacactttgggaggccaaggcaggtggatcacaaggtcaggagattgagaccatcctggctaacacagtgaaaccccgtctctactaaaaatacaaaaaaaaaattagccaggcgtggtggcaggcgcctgtaggcccatctactctggaggctgaggcaggagaatgacatgaacccaggaggcggagcttgcagtgagccaagattgtgccattgcactccagcctgggcaacagagtgagactctatctcaaaaaaataaaaaataaataaaataaataaaaaaccccaaacaacaaaaacagtaaagacagtaatcttggccatatttagaggtttcaaatatatatatatatatttgccttttttagtttttctttatatatatatatatttgcctttttttagtttttcttttttaaaattttatatatataaaattatatgtcatatataaaattatatataaacagcaaatatactttggattctgtgaaatttcaggcttctagggctgcccacctctcctcacatggcctagttcttgtagagatatcccagatcccaagatgttcaacactcccctactcccctccatttcccacagcccctgggttctcaccctatcttcacctataggtaatccatctcagttaagatttagcaggtggtaggggtgagtaccaatagttcttccctctgaacacatcttttatgctcaggaaaaagaacaagtatttttctcttcacttagtctctcaaaaggaaggtaataaccaagccagcgagatccaatgcattgctcaacttgcctagagaagattgtctgccccgaaagcatcccccaaaaaccatgtgaggaagtccactgggtgctctgccctgcctgcaagaccctgggcatccccccaacttcctcctggccttgcccaagcaccatcagctctccagagtatccacgtcagcctggcaccatccaccagagtttcagctctgggacacagcagcaaaggcccagccttgaaaccaaagagaatccattagggaaattaatgtgtccaataactgctgcctctatttttattagaacaaacttgctcaggaatggggaatctgtccctgtggacagcttttctggacaagcatactgtctctatcttgtttctgagattaaagtggcctctttattagaaaagtggtgatttggccgagcatggtggctcacgcatgtaatcctagcacattgggaggccgaggcgggtggatcatgaggtcaggagatcgagacaatcctggccaatacggtgaaaccccgtctctactaaaaatacaaaaattagctgggcgtggtggcaggcgcctgtagtcccagctactcgggaggctgaggtaggagaatggcttgaatccgggaggcggaggttgcagtgagccgagattgcgccctgcattccaacctgggcaacagagctagactctgtctcaaaaaaaaaaaaaaaaaaaagaaagaaaagtggtgcttccagcagaggtttccttcttccagcaccactgacaggctccagttaccccacatctgaccctctcagacattgggaggaggagacagcgtgaatgggaggctcaagggctagtctcctgcagggtgagtcctgagccactgacctgggctcggtgcactcagggccacagcctcctccctatattgggttcagggtttacagtaggtgctcactaaagaatgcgtattcagattaatctgacccctggtattttctttcacactcagcttctctcagcctctccttctgcattgtcctcccagaatgattaagccattctcttttgagggttctattgctggtcactgttgaaagatttttttaaaggtaaaatcatgatactcatacaaacataaaataaacagttgtcaaatattttatttaactcattaattaatgagagaagcagtaggatggtagaaatgattcaaaggagaagtcaaagaacacgcatacacataggcaaatggaatactaaaatgaatttccaaaaacaagcaaaattggtcaatgtctgtatgtattccgctgggcaaagttcattggcatttctatggacaaggatcacttgcagtactctcaggtcagaaaatgaaacacttacagaacctggaagagtacctggcacaggacataggacatccggaaatttctccatattccaacgtctttcacaattttttctgacaccttcaattgaaaacaggccagaaaccacatggccaccgggacattatcaagcttctaccaccctcacaagctggtctctggttcttttcctcatgggctctccagctgccctagtcataacagcaggaattagagcaaaaccttgggctgctgcggtggctaatgcctgtaatcccagcactttgggaggctaaggctggaggacctcttgagcccaggtgttcaagaccagcctgggcaatatagtgagaacctgtgtctaaatttaaaaaaattttttttttgagacagtcttgctctgtcacccaggctggagtgcagtggcatgatctgggcttactgcaacctccgtctcctgagttcaagtgattcttctctctcaggaacccccaacccccgccgccatcatgcccagctaattttttgtgtttttagtacagatggggcttcaccattttggccaggctggtcttgaagtcctgagctcaggtgatctgcccgtcttggcctcccaaagtgctaggattaccgacaccactgcacctggccaaaaacattttttttttatttaaaaaaaggcaaaaccttctcagctccttctgctcccttgctggacctccataggttgtagtcatatctcagttatagccccttgtatttccttacactgttatctgttttcttgttcctccacccactcgactatgagctcttgtgggacatgacccctggttttgtttgtttgtttgtttgtttaacacaaggtctcactctgtcacccagactagagtgcagtgatgcgatcatggctcactgcagcctcaacctcctgagctcaggtgatcctcccacctcagcctcccgagtagctggggactacatgtgcacgccatcatgcccagctaatttttaaattttttgtagagacaggatctcactatgttgccctgcctctccttctgtatggtcctccccaaatgattaagccattctctttgtgggattctattgctggtcgctgctgaaagattttttttaaaggtaaaatgatgatactcatacaaatataaaacaaacagatgtcaaagattttatttaactcattaattaatggttgtgaactcctggactcaagcaaacattccaccttggcctcccaaagtgctgggattacaggcataagcccacacccatccaaaacccatgtcttattgtctttggccagaatgaataaatgtatcagtctgagtcccatcaagagagaaaaaaaacagtagttcaaatagaaaaagtttaatataaagaattattaaccataggctgggcacgatggcttatgcctgtaatcctggtactttgggaggccgaggcaggtggatcacctgaggtcaggagttcgagaccagcctggccaacatggtgaaaccccgtctctactaaaaatacaaaaattagctgggcatggtggtaggcgcctgtagtctcagctgctcaggggggctgaggcaggagaatcgcttgaacccgagaagggaaggttgcagtgagctgagattgcaccattgcactccagcctgggggacaagagtgagacttcgtctcaaaaaaaaaacacaaaaaacaaaaaacaaagaattactaaccataacatggaattagacagagtaaccagaggtggggtagtaagaaataaaaagaataaaaaagaatataggaatagcagatataattgatgtgataatggcagattaatattcttaggcctctgagcccaagcctgtgcttatacatccagatggcctgaggcaactggagaatcacaaaagaagtgaaaatggccggttcctgccttaactgatgacattaccttatgaaattccttctcttggctcagaagctcccccactgagcaccttgagaccccctttgactataattttccactacctacccaaatcctataaaactgccccatccctaagtccctttgctgactctctttttggactcagcccacctgcacccaggtgattaaaaagctttattgctcacacaaagcctgtttggtggtctctttacatggatgtgcatgacaaatataatataaaaagccaccaccccagggctgagatgtagtacttacccttgggctgagatataggccttgctggagaagcatggctgtgactcactaaatatcagagacctcactgaggtgccatgccagtggaacatgctagaaatctgtcttctggggtgctggggagaaggctgttcacagggaagtaactcagtgcagacagttcgctacaaaaccatcagaattggatacaggggaaagctactgtactaggtgctgctgattacacattgcaagagacagatactgaggaatccagctgtgctgctggagtctggagaagcttcaagcactgaaggagctgtgctggagaagccacccttgctgctggcgtgaggcactgggaaaccacatccaccgcagaagcctggtgctggggcaggcctcgcacaccgcaggggcctgcagagctggcaatggaaccaggaagcaaaacccttttcctcctgcactcattcttccctggcctctactgacaattaagtgccagatggcaaaggaacaaaataaagaaatacttaaaaggcccagatacgttttcacagagcaggcaaaaaagaatggctttggagctgacaggcaaaataccaataaccagcacagacttccggttccattcctcagtacatccaccaattccaccctgcaggccaagctcatccaacccaccttattttgttgttcatgttctgttttgttttgttttaggcttttagcaacctgaagccatggtttttagtttctgtctctagtgaaaagcagaaaagagagataaagaaggggctttgttagcccagccagaaacagaaactaagaacccatggctgtgttctctctcggacacccctgtttaggccatttcctgctactgattacctgttgaatgaagaatgaatggccaggtgtggtggctcactataatctcagcactttgggaggccaatgtgtgcagaggaagcgggggcaggagtaggggaaatcacttgaggtcaggagtttgagaccagcctggccaacatgataaaaccctgtctctactaaaaatacaaaaattagtcagccatggtggtgggcgcctgtaatcccagctactcaggaagctgaggcaggagaatcgcttgaacccaggaggccgaggttgcagtgagctgagatcgcaccactgcactccagcctgggcaacagagcgagactctgtctcaaaaaataaaaataaaaaaaataaataaagaataaatgatgaagagttaagggaagagcagtggtctggaaggatcagttatttggacgcctcctcatcagaagtgagtcatttacatctcagagactgtctaggctgagcgacttcctttgtttttgagtgcccacctctgcagaggaaatgcctctttgggagcatttcccatgctataggggagggacttccaaactgaattactctccttttcctcagccaaaacgcatcttcatgcctcatattttttcttttcaaaaatacatcctacttttcttaccaaatatgcacatagaggtgtttttgcttatttttttaaataatgctatttttcaatgtggcacaggacatgtttgctaaccaaatatcattcattcctctatagtaagtgaacaatagataagtatatacttatgtgaggcaattaatgcttcagtatatctccttgtttggaaataatctatgaatgcaatgaatatccatcatttaacttagcaaaactctaagggtgaaagataccaaagagagttgtagaattattataattctcatcattttttgagacagggtcttgctctgtcaccaagggtggagtgcagtggcacgattacagctcactgcagtcttgaccttccatgctcaagtgatcctcctatcacagcctcctgagtagctgggaccacaggtgcatgacaccacgcccagctaactaatttgtttgtagacacaggttccaactgtgttgcccaggcagtctcaaactcctgggctcaagcaatcctcccaccttggcctcctaaagtgctggagttacaagcatgaggtatgagccaccatgctcagcctggagaattatttttaaataaacatattacaaaacataatgattggtgaaaagataaacagatgtgagatagaagcttataaattaactcagctgtttttaaacaatcttgcttggattaatcataaaaattccatgagacataaacagctagccatcatcttaaattattttcttgctgataaatttttttttctggggcgttcctgagtttatttggggcacacccgggcgagggccctgcacctagaagaaggtgttgggcctcttggtggtgaagcgtggcttgtgctgacggcgcaggacccggtggggcagcgggaacttgatcttggagtcgtggaactgcttgacagccggccggcggcacttgctggccgcgatctcctccaccttcatgatctgaatggagtgggcccggccgccgtgccgggcgctcatgtctcggtagcaccgggtgacagcgcctgcggtggtcaggtcccggtattcccggtacatgttgtgggtgccgctccgggagtcatagcgcagccagatcccgaagttcttcacccgcaaggggaacttctcaaacacctgcccacagtagacaatctcccctgaagacttcttcatcttctttaactgagatacgaagtaccagaagcgggacttggcgacgacatgattaggcgcaaagattcgcatgcggtagaggggtggtgtgtggcatttgggggtgggcaggcagcgacccactactttgtactctcgtagtgtgcccgaggccttcatggcgtgctctccgcgttcgccgccacccgcaaaaggagacttgctgataaattttgtaacataaaaacaacaggaacggctgggcgcggtggctcacgcttataatcccagcacttcaggaggctgaggcgggtgtatcacctgaggtcaagagtttgagaccagcctggccaacatgataaaaccccgtctctgctaaaaatataaaattagacaggcgtggtggcttgtgcctgtaatcccagctactcaggagactgaggcaggagaattgcttgaacctgggagacggaggttgcggtgagctgagatcgcaccactgcactccagcctgggcaacaaaagtgaaactgtctcaaaaaaaaaaaaaaaaaagaaagaaagaaagaaaagatgtgattgacaaaaaaaaaaaaaaaatttggttatttctgtgacgtacaaaaatttaacataataatcattataattgataacatttactaagacatatcagaattttaggaatctcacacaattttggaacacatattaacaacacatttatacaaatagaactcagagaaagttaaacgccatttcttacttgacaatgcttcctgtgtgacatttacatacaaaataaacttagtgtgtctctcttgaacttccagcggctctttttggaacttgaaatttaattttaggaagtttgttaaatatgaaaggtttaaaacattttatcaaaataggatcacaggtcactgtaaaataataatcattcattgagccaaagtgataattcaaagatttcaaaaagcaaaaactttactctttgatagagaagagtctcattttcccaacaatcaaaagacctaataaagacagcatgaggcaaacaaagtctgtctctccctctcccctcatttttttcagtatacttaaaagtaaacaaaaatctattattaccccttattaatactagatgaaaatctttttcaaaattctacctttgcatcagtgtattattaatggcaaagctaattttaacaaaaccttataacaaattcacccaaattcaatcagtttgaccatacacaataagagttccataaaccttttagaacctcttataatttttttcattctctttcttttagctttttatatgcattccattttatctatcattccttttatttcttaaatttctttttatttatgtatttatttatgtattgagactgagtctctctctctctgtcactcagactagagtgcagtggtgcaatctcagctcactgctgcctcagccttctgggctcaggtgatcctcccatctcagcctcctgagtagctgggactataggcatgtggcaccatgcctggctcattttctgtagagagggggttttgtcatgttgcccatggctggatatctgttgtttttttttccttggttttttttttttttttgagatggagtcttgctctgtcgcccaggctggagtacagtggtgtgatctcagctcgctgcaacctctgcctcccgggttcaattgattctcctgcctcagcctccctagcagctgggattacaggtgcccaacaccaagcccagctaatttgtgtatttttagtagagatggggttttgccatattggctgggctggtctcgaaatctttatctcagttaatccaccaacctcagcctcccaaagtgctgggattacaggcgtgagccaccacacctgaccctaatttttttatctttttgagacagggtctcactctgttgcccaggctgagtgcagtgatgtcatcacagttcactgcagccttgacctcccaggttcaattgatcctcccacctcagccttccaagtagctgggactacaggcatgcaccaccaagcccagctaaaaatatgtattatttaatttgtctcagcaaaactctaagggtatagagttaccaaaaagattttagaaacttttttttaactctttctttctctctctgtataggagacaggggtctcactttgctgtctaagctggactaaaactcctggaatcaaatgatcctcccacctcagcctcttgagtagctgaaactacaggcgtatgccaccacgcttgcctctgagaaacctttttaagaaaacacattataaaacataactattattaaaagttcattgtaggccaggcaaggtggttcatgcctataatcccaacacattgggaagctaaggcaggaggattgcttgagccccggaggttgaggctgcagtaaggtatgttcataccactgcactccagcctgggcaacaaagcaagaccttgtctcaaaaaaagaaagtccatttgtaaacttttatctcattgacatttatttattcttaacaattgtgtttgaaaaattgtatgagacatgaaacaaatctagtcattatctcaagttaaattttttattaactatttttatatgttaggcaagtatcaaaaaagcaagaactttgaagttaaatacatgtatagtttgctgataagtcaaaagacatagttcttttttttattaaaccaacaatattaaactagtccttggccaggcgcagtggctcacgcctgtaatcccaacactttggaaggctgaggcggatggatcacctgaggttaggaatttgagaccagcctggccaacatggtgaaaccctgtgtctactaaaaatacaaaaaattagctgggcgtggcggtgcacccctgtaatcccagctactctggaggctgaggcaggagaattccttgaacccagaaggtgaaggttgcagtgagcactgcactccagtctgggtgacagagcaagacttggtctaaaaaaaaaattaaatataaaccaaaagactgctaaagtcacattaactggtgtcttgtgaaagggtcatatatacaaagtgaccctgataagcagaaggagccaggaaactgaagaagaagggagacaagtccagcttgtcatcatagaggtgattttattggggaacttacagacagaagtgtggtgttgggcaaccacaagacagatcgaccaggagtggtggctcacacctgtaattccagaactttgggaggccaagatgggtggatcgcttgagcccaggagtccaagcctgggcaacagagcgagactccatgtcaaaaaaaaaaagagggaagagggccaacagagcatttgcagtttttagggcccagtaataatatatgaaaggcaggcacagcgggaaaacagaacatctagatctttaaaaatcaattccggacgggcgcggtggctcacgcctgtaatcccacactttgggaggccgaggtgggtggatcacgaggtcaggagttcaagaccagcctggccaagatggtgaaaccctgtctctactaacaatacaacaattagtcgggcgcagtggcaggagcctgtaatcctagctactcgggaggctgaggcaggagaatcgcttaaacccagggggcggaggttgcagtgagctgacatctccccactgcactccagcctgggcaacagagtgatactctgtctcaaaaaaaaaaaaaaagaaaagaaaaaaaaaatcaaagattccacttttacactgaaacccaagaccctaaaaagaggaaaataccacaggaggctgcacaacacttccacagtgcacctcactacaaagatattcccccgaagctggtgggtgacccactgccaatcagcccactttgtgaccagcccacctcccatgggaatcttgtccgttggtggtgagtgctcttacagcctctaagtgttcaaaccatgcctttcttaagtaaacgtgcaaagaagaaagtagccccctgcagtaataaccattcattgaaactgttatcggccacctctaaaactgcagctttcatcagcaactagccagccatcacacacacaaaggtcaagttctttctcacactacagcttactccctggtaccctcaaaagccaaggagagagggggcccagaagagggttgcccttttcacacttgaatgcaaagggttttataagaaacctatgagggctaggcatctcatttgcataagatgtgaatttttggtagctccactccatcatcctaatgtgcacctgggcccttagcttgagttactccagattgctttattccccttactgcgcatgtgtcaggggacggaattttgcattgcaggcatgtctgcaagggcaagtcacctgtgtagcctttcttatctatgcggcagtgggcatgtcttagggaagcccctctgtatgagttcccttatctgtgcctgcagcatgcagcatgatttttttttttttttttttttttgagacagagtctcactctgtcgcccaggctggagtgcagtggcgtggtctcggctcaccgcaaactccgcctcctgggttcacaccattctcctgcctcaatctcccaagtagctgggactacaggcacccaccaccacgcccagctaattttttttttttttgtattttttagtagagatggggtttcgccatgttagccaggatggtctggatctcctgacctcgtgatccgcccgcctgtgcctcccaaagtgttgggattacaggcgtgagccactgtgcccagcctccagcatgatttttttaggccgttcttttgtttgaaagaattcaactaaggatccactctgcctgcctgaccggtttcttcctttcttctctctcatcgggtcccgagttcccatgactgcagcttccagaagagcagagctttggtatcctactcacagcgccaaaactgcaggggccaaggtaaaacttgccctttaccctctgaaggtttgctgaaaaatcaactaacaatagcagatttattggcgaaaaggaatacaaatttattagcgtgcatatgggagagaaccacagagtgattatccctaccatgcaatggggttctgaagcttgtatgtcatcttgaggttccagaaagaatgggggctttggttgtggcaaaacaggttctgggagggggaggaggcctgactagcaaaggtggtcttgttatgcagatgaaacctcacaggtagcagtcctcagaatagatgataaatgtttcttttgaaaccacctttgcaaaaattctaacagtgagaagattatgacagtgaaagagatctgacctaaccaaccccatcttgcctctaaccttcaaactgcccttaatcattcctggacttagaccaacctaactttgggagacatttagtttatagtttaaatgataataacccttacccaaaactaaatcacctttgtaaagctaatgagagactaccaggttaggaggatgtgagcaggctgaattctaaggtgtaaacataaacaattaccagccattatgctggaggtcataagatttgcaactctcccagttactcctgcagataacatcactattacttttaatcgcaaaaactgcaattattttgcaccaacctaatagaacctaagattggtcttttgttgttgttttgtttttgtttttgagacagagtttcgctcatgttgcccaggctggagtgcaatggtgcgatctcggctcaccacaacctccgccttccaggttcaagtcattttcctgcctcagcctcccaagtagctgggattacaggcatgtgccaccatgcccggctaattttgtatttttagtaggctaatactaattttagtattttggtcaggctggtctcgaattcctgacctcaggtgatcctcccaccttggcctcccaaagtgctgggattacaggtatgggccactgcgcacagccaagattggtcttttgagatatcttttcaggtttttgcatttctgactaacgatgaaccaatggctccactgagacctgctgatctctgccacctggtcatgtggccccacccagaaataggctccctggcctgccaaactatccttaaaaaccctaacctctgaatttttcagggagattgatttgagtaataattcagtcttccacgtggcgtggccagccttgtatctattaaactctttctttattgcaatgctgtggtctcagtgaattggttttgcctgtgcagtgggcaggacgaacccatcaggtggttacactttcagacttttaaaggtgtcagactgaaactgttgtacttgagcgagttagagaaaacgccacacttgtagacgaattaagagtctgtttatttagccagcggccaagagacggctaacgctcaaagttctttagaccccaaagaaggagctaaattttcttttatactttggtttagaaggggaggggggggtctagttaaaacaattttacagaagtaaagtaggcaaaaaagttaaaaggataaatggttacaggaaagtaaacagttccaggtgcaggggctttaagactattacaaggtgatagacgcggggctttgggcgttattaatcgggcgttattaatgggacgaattcctgggaactgcggatatagctcaccacagcatcttatcagttcattgcattcttggatgtgctgggagtcagcttgcacaggttaagtccttgaggaaggggctgccagtgaaagagccaagatggagtctgcctggctctcttagctaagggagagtcaattcaggtggaaacaaggctaggtgattaaaggaaagggagagtctaaaaacagggttagtaaaaacaaggttaggcattacaaaactgcctttgcaaaaatcataactgaggaaattatgacagtgaaaaaggtcagacctcactgattccacattgcttctagcctctaagctgtctgttcattcctgggtgtaggctgagctagtcttgggaaggaatttagtttatagtttaaactctgaaccaacaaaattgacaatagcactttctggaaaaaaacccttgcttgcgtggagaccagtctgtctttgtaggactaactttcatgcacgtccgtgtgaagagaccactaaacaggctttgtgtgagcaataatgcttttaattacctgggtgcaggcgggctgagtccgaaaagacagtcagcgaagggagatggggtggggccgttttataggatttgggtaggtaaaggaaaaaggggggttgttctctggcgggctggagtgggggtcacaaggtactcagtgggggggcttttgagccaggatgagccaggagaaggaatttcacaagacaatgtcatcagttaaggcaggagcaggccattttcacttcttttgtggtggaatgtcatcagttaaggcaggaaccggccatctggatgtgtacgtgcaggtctcaggggatatgatggcttggcttgggctcagaggcctgacataattagccacaagattagaaattatgatttaggagccatgcagtctctggctggaagagtctcaacctccccaaattgcttctgggaataagatcactgttgcaaaacctaagatcagtgtttgagatattttgcagaccctgcattccaatgcagcagatgacaccactcagactgctaatctggctcaaccagtcctgtgatcccatccaggaacagaagtcagcaagaactcacttcaaccccctgtaattttatcttcaatccgaccaatcaacactccctacttcctgagcccatacctgccaaataatccttaaaaacgctgatccctgaatgctcagggagactgatttgagtaataataaaactccagtcttccacacagacggctgtgcatgaattactctttcaccattgcaattccgctgtcttgataaattcgctctgtctaggcagtgaacaaggtgaacccactgggtggttacaagactctcagttaatctttcctagattcagagaagggaaggctttagaggaaagagaaaatgcagagaaaaatggctgcattaacgcagattttctctacagatgcaaatcttccgcacaaaagacagctttgcagggctgcttctgtttgcaggccctctgaacagccatctcaaaacatgtcaaagaagtatatcttggggtgagatattttaatttccttcctatacatgggaaatagcccagagaaaatgtgtaactctccaagaggtagcttagaattcaggcttatattgcatcttcagctaaaaatcaaaggaaaaaagtatgggggatgctggttataaggatatgaccaggaaaagcatggtaaacaaaattaaagtttatcatgcagatttaatttggtgccttctccattgaaaagagtttcctatgatttagttacccttctcttcctggtgcagagagggagacacccttacaaatggagattttctttatagatgtaaatttcccttacaaaagggtaacttctactctgtttttagagcttctcctgtgtctgctgtttctcaaaataatcagctcaaaatagcctttatgccaaagaggcatattttggggtggcacattctggtctcctacactacccatttaaatattgtcctttacctcccattatagccttcattttttgtattaaatatatttacttttatggagatagtagatggtataaattttctgtttttacttgacagagtaaaccttgccaaccttactgagaaagtatacttctcaaaaagttaaaaaaacatgaatctcatgcaaataaaaaaatgagcacatgtcacatgtttagttaactcattaatgaaggaaccagcaaaatggtaaggctagttcaaagagaattaaagagagtgaagcctttatagcggctaaaggaaagaatgtttgcaaaagtttgccaatttagatacaaaactggataattttttttctttttgaaactgagtctcactatgtcacccaggctgaagtgcagtggtgcaatctcggctcactgcaaactctgcctcctgggttcaagcgattctcctgcatcaacctcccaagtagctgagattacaggcacccactaccatgcccagctgatttttgtatttttagtagagatgggttttcaccatctttgctaggctggtctcaaactaccaatctcaggtgatccaccgccccctctgcctcccaaagtgctgggattataggcatgagacactgtgccagtgaaaactggcttatagtctacattaactgtcacctttgggattgtcttctctaaaggacagaaataatcagcatctgtataggacaaaattaatttaaattcctactcgttttctaccagctagtcttctagttaaatactgtactcaatagattagcaattcaaacgaaggcacatacccctagccgatcagataatccttgggtatgtttactagacaaagcccagtagcaccctgagaagaaaggtagtaatcccttttccctatttccaagttttggaaatctttccttaatgtgcttttggtcacctaatggtattgagttttctttgtatctttctttgtttgttttatttttaaattttactgatccaccccaaaactttagaactattcactctaggaaatgttttacataagattttattgaagaaaaataaaagtagctgggcatggtggtacatacctgtaatcctagttatttgggaagctgaggcaggaggataacttgagcccaggagtttgagaccagactgaacaatagagggaccatgcctaaaaaaaaaaaaaaaaaaaagggagagggaagaaacatcaaataaaaatgtttacaagaggcattttcttttttttcctttttttgagacaaggtctcgctctgtcacccaggctggagtgcagtggcgtgacgccagctcactgcaacctccgctttctgggttccatgcccggctaatttttttgtatttttttttttttagtagagatagggtttcaccaggttggccaggccagtcttgaactcctggcctcaagtgatccacccacctcagcctcccaaattgctggaattacaggcgtgagccaccatgcctggccttcaagaggcattttctactcattcaatatgaaaaatagctttattgtatctcttggaaacagtatatgttctcacaacttttataacctcccttgtagagtagagaaatattaatggcaaaattgactctctttttaatcgctgaacctatttaagaaggactttctaggccgggtgcggtggctcacgcctgtaatcccagcactttgggaggccgaggcaggcggatcatgaggtcaggagatcgagaccgtcctggctaacatggtgaaaccccgtctctactaaaaatacaaaaaattagccgggcgtggtggtgggcgtctataggcccagctattctggaggctgaggcaggagaatggcattaacccaggaggcagagcttgcagtgagccgagatggcgccactgcactccagcctgggtgacagagcgatactccgtctcaaaaaaaaaaaaaaaagactttctagtcttcttcctggattgagatctccaggccccagtttatcctgctaaggcagctcatactgacttagacactgacttaagggatttactggcaaaacctcaaaagaaatggggccccagagggtcatgatggggtaatatttgggggccagtgggagaagggcccagaaaagaaggcagggtttggggcattgtaattctgcagagacccatgccaaaagtccaagagtgctcaggtgagatccttaagatagtaggggtaaacttaacttttgaaaacatggagctttcaaagcagcctattgggcttagagaatttaaaaggaaagcatttcccttaaggacctagtcctttctagataactgagggcaggggataatatgtcacaggagtccgtcctctgcctccaagtcattatgggtccaagtggctgttatgctaatggcacagtctaccaaataaatgttttttccctcgtgaatggcatatatgccttctgaaaataatgcttctatccataagagtggctaatggtggggattttagatactacatcaaaccagtggtactgatgttactggatggtatagtgggtggcctatcactaccagttcctgttgtagcagaccaaaatgccaccccaaaacatgactgtaggagaccagaatatgccaccccaaaatgcgtctctttgacataaggactatttacagctgatatttttgagaaacagcagacacaggaaaaggtctgaaaacagtaaaaattgctcttttgtaagggaaatttacatctataaaggaaatctccatttataatgctgtctcctctctgtaccaggaagagaaagatgactaaatcacaggaaattcttattgtaactgaggagcttagtggcttagcctcaaacttttttttcggctgggcacagaggctcacacctgtaatcccagcactttgggaggctgaggcgggtgggtcacctgatgtcaggagtttgagaccagtctggccaacatggtgaaaccccatctctactaaaaatacaaaaattagctaggcgtggtggtgggcgcctgtagtgccagctacttctccagctactgaggcaggagaatcgcttgaacccaagaggcagaggttgcagtgagccgagcatgccactgcactccagcctgggcaacagagtgagactccacgtcaggaaaaaaaaaaaaaagtttttgtcaaagataaacatcaaaacattcctcaaaatcaaactctgtcttaaaaaaaaaaaaaagacaacttttttttctttaaaactttttttccagccaggcgtagtggcttatgcctgtaatctcagcactttgggaggccgaggtgggcagatcacttgaggtcaggagttcaagaccagcctggccaacatggtgaaacctgtctctactaaaaatacaaaaactagccaggcttggtggtgcatgcctgtaatcccagctacttgggaggctgaggcagaagaatcacttgaaaccaggagacgaagtttgcagcaagccaagatggtgccactgcactccagcctgggcaacagagcgagactctgtctcaaaaaaataaataaataagaaataaaacatttttttctttttccatttgctcttctccctgccctacccagtttcaagatgtagttctgagataaactttacagcctcggaatgttccacactcacttatctggtcatatatttgcttcaacgcttcaggggtcagatcttgatatggacctgacatctccagaagtctcactctaacaaaagatgacttcaaggctggaacctattcctggctactagattgactgtgattaatttataacctggtaggacccacgatggcaccaaccccttcaccagaaggaacaataattcaagatgagccatgggagcaaatcacacagcatggcagctcccagtcctcctgcctcttctgcattccagacctgctctttaaaaacctgggcattccctccacaaattgaagagtggaattttttttcacctgctcttcctcttgctggcacagatcataaagtcttgctctctttctatcacatctcattattattttggcttctttctacaagcaaggagcagcaggcccttttacattaccattagtgaaggcacttgagttaaatccgcacaacgaatcttactcttgcctgtaatcccagcactttggaaagccaaggcgggtggatcacctgaggtcaggagttcgagaccagcctggccaatgtggtaaaacctatctctactaaaaatacaaaaaattggccaggtgtggtggtgggggcctgtaatcccagctactcaagaggctgaggcaggagaatagtttgaacccgggaggcggaagttgcagtgacccgagatcataccactgcactgtagcctgggcaacaagagcaaaactctgtctcaaaaaaaaaaaccaaatcgtactcttgtttaccatacttttcctggtcatcttcccataaccagtcatcaacagatgatagtacttaagcttgaattctaaatcacctctaaatcaatctaaatgaaatgagatttcatcatttttctgggtgtctcccatgtgtacatgatatgtacatgttaataaacttctgtttgtttttcttttattagtctgtcttttgttacagaaggctccagctaaaaacttggaaagggtaaaggaaatatttttgtcctacattatgctgtccagtaagatagccactcaccacatgtggctgttgagtgcttggaacgtggccagtacaaaatatacaaagtgtaaaatacacatcagatttcaaagccttactgtgaaaaaaaagtaaaatatctcatcaataactttatattgatcatatgttaaaatgacattttggatatactgagctaaatatcattattttttatttttattttttttgagacggagttttactctgtctcccaggctggagtgcaatggtgcaatctcggctcactgcaacctctgcctcctgggttcaagtgattctcctgcctcagcctcccaagtagctgggattacaggcacctgccactgtgcccaggtaattttttttttgtactttttagtagagtcagggtttcaccatgttggctaggctggtctcgaacacatgacctcaggtgatccacccaccttggcctcccagagtgctaggattccaggcatgagccaccagccaatatattattaaaaataatttcttgctgggcatgttggcttatgcctgtaagtaatcccagcattttgggagactgaggtgggcaaatcacctgaggtcaggagtttgagaccagcctggcccacatagtgaaaccctgaatctactaaaaatacaaaaaattagctgggtttggtggtgcgtgcctgtaatctcagctacttgggaggctaaggcaggagaattgcttgaatctgggagacagaggttgcggtgggccaagatagcgccactgcactccagccttagcaacaagagcacaactccatctcaaaataataataataatttcttggctccaagtctcagctcccgcaccacctgacactgtcagatcctcaggccatggccaacactgagagcatcattatcaatccgagtgctgttcagcacagcctggtgggtgaaatcatcaaatactctgagcagaagggattctacctggtgaccatgaagttccttcgggcctctgagaaacccctgaagtagcactacactaacctgaaagaccacccattcttcccggacctttctgagcacaaggtccattttgtggatggattgtctttcccccttaggtctgagtgctcaagcagatcgtggcgtattcattagtgtatcccagtgcctggcacatattaggcgctcaatataagtgaagtacatgaactcagggcaggttgtggccatggtcctggaggggctgaatgtggcaaagacagggctaaggatgcttggggagaccaattcattgggctctatgctagagactattattcgcagggacttctgcgctaaaataggcgggaacgtcattggtggcagtgattcattacaaagtgctggcaaagaaatggcttaaagaagaagaactggttgactacaaatctcgtgcctatgactagatctatgaataaaaggaggtcaaagcagcagtctgcctcgacgccgttcctgggtccctagacacagctcttcatcccattgacttggaggcaataggatgaatccttctttactaataaagcctttggaaactggaggcaaaacttactttgtttctttctacttttaaaaatgtgtgtactggaaatgttaaaatgacacaagtggctggcattaccttcctgttggacagtgctggaccactatcatctgctggcttcccacagctcttaaggtgcagcaactcccaagcctgtcattcctcccacctgccttgacagcctcatctggcactcatttgtaggatggatgtctgttgtcccaggtagtggttactccattcatctccatccatgctctgtgcaatcagtgatacgggaacacactgtggaactggggaatcagggacttggaatttaatcccaacattgccactaacttgctatgggaccaggcaagtcccttaaccaacccccacccaaccctgctgttttaccttccccactttaattatatagcctgagtgagaccaactccaatatcccttcctgctctagaggttctgtttttcccttttttttttttttttttttttgacaaagtcttgctctgttatccaggttggagagcagtggtgccatctcagctgactgcaacctctgcctcctgggctcaagcaattttcctgcctcagcctcccaagtagctgggaccacaggcatgtgccaccacacctagctaatttttgtatttgttgtaaagatggggtttcaccatgttgcccaggctagtcttgaactcctgagctcaagcaatgtgcctacctccatgagccaccacacccggcctagaggttctgtttctttacaggagcctcgggccatgtacgttctgcttggggataaaaggagaaaaaggaactcttaaaattattgttggggctgggctcagtagctcacacctgtaatcccaaccctttggaggctgaggcgggcatatcatctgaggtcaggagttcaagaccagcctggccaacatggtgaaatccgcctctactaaaaatacaaaaataagccaggcatggtggcgggcacctgcaattccagctacttgggaggctgaagcacaagaaccacttcaacttgggagccaggagttgcagtgtgctgagattgctctgttacagtgagccaagatcatgtcactgcaccccagcctgggtgacagagcaagagactctgtctcaaaaaaaaaaaaaaagttattcttggctggccacggtggctcgtgcttataatcccagcactttgaggagccaaggtgggaggatcactttagcccaggagtttgagacaagcctggacgatatagcaagaccccgtctctactttgtattatataatttttaaaaataaaaataataaaattatgattgttatttggcgacctgtatcctttgtctagataagcaactggaggaggtacaccaggcctgtctttttgaccctgggcccgaatggtgacttttaagcttgctgcatttcacccaggcaaagtaggttctgctgccaggcttttgcccccatcagtccctctctatcaacattcattcagccaacttatattgagtgcctaatatgtgtgaggcactgggatacactgatgaatacaccacgatctgcttgagcactcagacctgaggggcaaagacagtccatccacagacaaccgtaatgcaaggtgtaccttgtgctcaggaagctgttcctgctaagggggctgggggtcagggaaggtttcctgggggagggccacctgtgctgtgtttcgtggggtaggtgggagttagccagctgaagagaagtgggagagggaaggcattccaggcagtgggaacagcttgagcaaagacacagaagcaaggcacagcttggtgtgggccggaattctaagtcctctagtgttgttggagcttaaaattcagtggtaggagaggaagctggagaggtgggcaggaggctctgcttcagggcagcacttagaattcctgaggacatccaggcccactgcctggttcattttccctacctcttgccttcttttttcctggtttaggaaagatacaaaattcttgtgtgcagcctcttttggactccagctcttgttctctcgctgaatcccaccgccaccccttcaagtcatcggctgtgattcacctgtgggtttctgaaggctagaagcttccacaatgagccaggaaacaagttctgattggctgggaacagacctctgctccaagattcagggctggcagtattccttctgttctggtggctcgatcttcattgctttcctctggacttgtaagttattccaacaaaccccagctgctctgcagtgaaatgttccaaataattaatatttctgcaggaattaccttgtaaaagatatgtgcttttaagtatttggttattgtgcaaatgtttttgactaccttttgtggccaattttctccttcagcgggctcatgtataattttagataaaagtacaaggaaattatgattccataatcataagtctactttcagcaatacacgtatcttcagagaatctcagcctccctgcagcatcctcctggtgcacagaaaaactgctgaattctggcaagatactcaaaggattctgacgggtgaccatctcaggccggagatatgcccaaccaactggaaaagcagagacagccatggacagatctgctgacgctaaagtttatagacagctgaggtgcaacccatataatcacccagatgttattaggccatgatcattctgtagtaagctacctcccttctgtgtttcctctcacctgacagcctattgtgggcactttcaaggccccactgtgtccaaatcacaccaccaccaaagctcacagaagcacgctggtagatttctcctctttggtggtttcccatgaccagccaagggaaatacccaacaatcattctcagtgtgcacagatttaccttcagcttttttggttatattgtcattattattttctttgtccagtgggagagttaaggggcctgctatggactgaactctgtccccctcaaattcatatgttgaagccccaaccttcaacatgactatatttgaaaacagtccctttatggaggtaaagttaaatgagatcataagagtggggcccttgttcgatagaactggtgtccttacaagaagaggaagaggctgagtgcagtggctcaagcctataatcccagcactttgggaagctgaggcaggaggtacgcttgggcccaggagttcaagaccagcttgggcaacataacaagaccctatctctacagaaaaaaattaaaaattaaccaggtgtgatggcatgtgcttgtggtaccagctactcaggaggctgagatgggtggatggcttgagcctgggaggtcaaggttgcagtgagctgtgatagcactgcactccagcctgggtaacagagcaagaccctgtccctccccacaccaccccaactccccccaaaaaggaagagataccagagtgcactctctcgatctctctctctctcttccacgtgaggacacagaagaaaaaaaaaaaagcccatctgcaaggcaggaagacggccttcaacagcaacgaaatcagtcagcaccttggtttggactgcttggtctccagaacgagggaaaataaattaaaataaatgtctgtagaattaa

SEQ ID NO: 32 - DNA, 57329 bp, Homo sapiens
  source 1..57329: mol_type = genomic DNA; note = HGNC Approved Gene Symbol: MLH1; note = Cytogenetic location: 3p22.2; note = Genomic coordinates (GRCh38): 3:36,993,466-37,050,846
agacgtttccttggctcttctggcgccaaaatgtcgttcgtggcaggggttattcggcggctggacgagacagtggtgaaccgcatcgcggcgggggaagttatccagcggccagctaatgctatcaaagagatgattgagaactggtacggagggagtcgagccgggctcacttaagggctacgacttaacgggccgcgtcactcaatggcgcggacacgcctctttgcccgggcagaggcatgtacagcgcatgcccacaacggcggaggccgccgggttccctgacgtgccagtcaggccttctccttttccgcagaccgtgtgtttctttaccgctctcccccgagaccttttaagggttgtttggagtgtaagtggaggaatatacgtagtgttgtcttaatggtaccgttaactaagtaaggaagccacttaatttaaaattatgtatgcagaacatgcgaagttaaaagatgtataaaagcttaagatggggagaaaaaccttttttcagagggtactgtgttactgttttcttgcttttcattcattccagaaatcatctgttcacatccaaaggcacaattcattttgagtttctttcaaaacaaatcgtttgtagttttaggacaggctgatgcactttgggcttgacttctgattaccctattgttaaattagtgacccctcttagtgttttcctgtcctttatttcggaggacgcacttcgaagataccagattttatgggtcatccttggattttgaagcttataactgtgacaaaaaatgtgaagggaagagatttgaaacatgtggaaggaaaagtgagtgcagactataaacttccaaaaagacaagcccaaaatacacctaaacgttatgtcagattattttgttaaaatcagttgttagtgacgtccgtacgttaatagaaaaaagaatgcttcagtttggagtggtaggtttctagagggatttattgtgaaagtataaactattcagggcaatgggactgagagaacagtgggtagaaaggaccactgaaggaaaggaagagaattggaaggtagatgaaagaaggagcaagaacctggggatgttttttccttttcacttgtaatagtagtaacagaagcaatggcagactggcttttgtttctactgtgttagaatgaattgacaggacaactgggcctattattgtactgtgccagaatactgtaaaacaaaactaaacatactagcttggtggcttgtaattaattacttaagtggagatttttattttttttttattttttttttagacggagtctcactttgtcacccaggctggagtgcagtggcgcgatctcagctgactgcaacctcctcctcacaggttcaagggagattctcctgcctcagcctcccgagtagctaggactataggcatgtgccaccacacctggctaattttgtatttttagtagagatgggatttctccatgttggtcaggctggtgtcaaaactctcgatctcaggtgaaccgcctgcctcagccttccaaagtgctgggattacaggcgtgagccaccgcgccctgcagttttttgtatttttaatagagacagggtttcaccatgttagccaggatggtctcgatttcctgacctcaggtgatctgcccgctttggcctcccaaagtgctgggattacaagcatgagccaccgcgcccggctcaagtggagatttttatatggagtccagttatactctttttaatatataagttgagatgactaatacaacttcaatacaggggctcatgagaaatgtctgtaatatttaagtaacttattgtcttctttcttttttttttaagatgaagtcttactctgttgcccaggcggaagtgcagtggcgtgatcttggctcagggcaacctctgcctcctggtttcaagcgatcttcctgcctcagcctcccgagtagctgggagtacaggcgtgcatgaccacacccggctaatttttttatttttagtagagacggggtttctccatgttggccgggctggtcttgaactcctgacctcaggtgatccgcccacctcagcctccccaagtgttgggattacaggtgtgagcccccgtgcccagcctattatcttatttctgaataaagaattgtctgtgtggggaatagataactctttctcatgcagcccctgctagaaaatttgttttctctagcagttggtctgtgcttataggctactctttgaaagcacaaaaaatttattgacttcttttttttgggtttttttttttttttgagacagagttttgcccttgttgcccaggttggagtgcaatggcgcgatctcagctcaccgcaacctccacctcctgggttcaagtgattctcctgccttagcctcctgagtagctgggattacaggcatgcgtcaccatgcctggctaattttgtatttttagtacaaatggggtttctccatgttggtcaggctggtctcaaactcctgacctcaggtgatccacccgccttggcctcccaaagtgctgggattatgggtgtgagccattgcgcctggccagaaaattcattgacttcctaaagatttattaactttctgcattacttttttttttcccctccatcgtaaatataaaagggaatagtagagaaaatcattcagaattttattttttagtgacattatttagtgacattttattagagtcacttaggaacctgaggctgaataaagttcaggtaaaagtaaaattagttgagaagagacatctgccaaaagaaatctatttttaacttcacttgctgtctttcctagaggaacagaaatagtgctgaatgtcctattagaaatgatggttgctctgcccgtctcttccctctctctcacacaatatgtaaactcatacagtgtatgagcctgtaagacaaaggaaaaacacgttaatgaggcactattgtttgtatttggagtttgttatcattgcttggctcatattaaaatatgtacattagagtagttgcagactgataaattattttctgtttgatttgccagtttagatgcaaaatccacaagtattcaagtgattgttaaagagggaggcctgaagttgattcagatccaagacaatggcaccgggatcagggtaagtaaaacctcaaagtagcaggatgtttgtgcgcttcatggaagagtcaggacctttctctgttctggaaactaggcttttgcagatgggattttttcactgaaaaattcaacaccaacaataaatatttattgagtacctattatttgctgggcactgttcaggggatgtgtcagtgaataaaatagattaaaatctattctcttctgatgcttacattatagtggtgggagacaaaatgggtataataaatattatattagatagcattaagtgctgtggagaaaactaaagcagggaggaagataggagtgtgcaagccagaaaggttgcaattaaattgagtagttcaggaaggcttcaatatggatgtgatatttgagagaccggtggaagtcaaggagcaagttgtgaggctatttaaaggtattcttggcttacagaacaatatacgcaaagactattaaatggaagcatacctgacatgttaaaggactatcaaggaggccagtttgtctagaggctgaaaaggaaagagtaataggagatgaggtctgagtgaaaacacgtaaatccttgtgggccaaggtaaaatctttagctttttttctgaatatggtgggatactgttagagggttttaagcagaggttacgtggtgtggtgagttttttttttttaatcctttgtctttctgtgtggaaaatagcaggacagggcagaagcagtctgtcctgcagactgcttggtcgcagtagagatgtaagaagcagtgagattctgggttaattatggaggcaaagttctcagaatttgctgatatagggtatgagagaaagaggaatcaggaatgatttcaaggttttggtctgctaaatggaaggagttgccatttactaagatgggaaagactatgaaagaagcagattttcagagagatcagaagttcattttggggcatgttcaatttaagatgcctgttagttggatgtttatgtgagtttggaatgcagggtagagatttagggatgaatatttggtagttgtctgcattttaatggtattaaaagccacgagaaggatgggcatggtggctcacacctgtaatcccagcactttgggaggccaaggcgggcagatcacctgaggtcgggagttcgagaccagcctgaccaacatggagaaaccccatctctactaaaaatatataattagccgggcgtggtggcacatgcctgtaatcccagctactcgggaggctgaggcaggagaatcgcttgaacctgggaggtggaggttgcgatgagccgagatcgcaccgttgcactccagcttgggcaacaagagcaaaactccatcaaaaaaaaaaaaaaaaaaaaaaaaaagccttgagactcacctgaaaagatgctcaacattattggtcattaggaaaatgaatgaaaaccacaatgagataccacttcacacctattaggatggctattatcaaaaacaaaaacaagtgtttgcaaggatgtagagattggaattcttgtgtattgctagagggaatgtaaaatagtgcagggtgctgtggaaaatgctgtggtgattcctcaaaaaattaaacataattatataatccagtaattccacttctgagttattcccaaaagaagggatgcaagcagatatttgtacactcatattcatggcagcattatttacagtagccaaaaggtgaaagcaacctaagtgtccgtcagtggatgaatggataaacaaaatggaataatttcagccttaaatagaaataaaatgttgacacatgttgcaacatatacgaaccttgaagacatcatgttaagttaaataagttggtcactaaaggacaaatattgtatgattccccttatgaggttcctagagtagtcacattcatagagacagtagagtggtggttgcccagggccggggggagcgaggagaatggaaattattgtttattgggtacagagtttctgtttggggaagatgaaaaaattctggagatggatcatgatgatagttaacacagcagtgtgaatatagttaatggcacagaactgtacatttaaaaatggttaagatggaaaattttctgttacatatattttactgcaatttttttaaattttattattatactttaagttttagggtacatgtgcacaacatgcaggtttgttacatatgtatacatgtgccatgttggtgtgctgcacccattaagtcatcatttagcattaggtatatctcctaatgctatccctcccccctcccccaccccacaacagtccccagtgtgtgatgttcccctttctgtgtccatgtgttctcattgttcaattcccacctatgagtgagcacatgcagtgtttggttttttgtccttgtgatagtttgctgagaatgatggtttccagcttcatccatgtccctgcaaaggacatgaactcatcattttttgtggctgcatagtattccatggtgtatatgtgccaccttttcttaatccagtctatcattgttggacatttgggttggttccaagtctttgctgttgcgaatagtgctgcagtaaacatacgtgtgcatgtgtctttatagcagcatgatttataatcctttgggtatatacccagtaatgggatggctgggtcaaatggtatttctagttctagatccctgaggaattgccacactgacttccacaatggttgaactagtttacagtcccaccaacagtgtaaaagtgttcctatttctccacatcctctccagcacctgttgtttcctgactttttaagatcgccattctaactggtgtgagatggtatctcattgtggttttgatttgcatttctctgatggccagtgatgatgagcatttcttcatgtgttttttggctgcataaatgtcttctttcgagaagtgtctgttcatatccttcactcactttttgatggggttgtttgtttttttcttgtaaatttgagttcattgaaaaattagaatttttttttttttcccttttttagaggcaaggtctcactctgtcgcccacactggagtgcagtagtgtaagcatagctcactgtaaccttgaactcctgggctcaagcaattctgtcatctcagccagctgaagtagtaactgtaggttcacaccaccatgcctatttttgtttttgtagaaatagggccttgctttgttgccaaggctggtcttgaactcctgacctcaagcagtcctcctgtctcagcctcccaaagtgctgggattataggtgtgagccactgcacccagccttggagatttttaataaagaagcttgtcaattaaacaaacaacaaaaagccctgagactgaatgagataatcaagagagtatgtgtagatagagaagaggtccaaggaaggagtcttgggtgactctgatgtcaagtgaggacatgaggcagaaacagcagtgactgagaaggagccacctagtaagaaaggaggaacaccaggacagtgtggtattctggattccaaacaaggaagttactgctaattttaaagctcttctcaggctgggcatggtggctcacacctgtagtcccagcacttcgggaggctgaggtaggtaaatcacttgagctcatgtgtttgagaccagcttgggcaacatggtgaaacctcatctctactaaaaatataagaaattaaggccaggtgtggtagttcatgcctgtaatcccagtgctttgggaggtcaaggcagccagatcatttgagatcaggagttcgagaccagcatggccagcatagtgaagccccatctctactaaaaatacaagaaaaaattaaccaagcatggtggcgcatacctgtaatcccagccactctggaggctgagacatgaaaattgcttgaacccgggaggcggaggttgcagtgagctgagatctcgccactgcacttcagcctgggtgacagagcaagactctgtctcaaaggaggttgcagtgagctgagatctcgccactgcacttcagcctgggtgacagagcaagactctgtctcaaaaaaaaaaaaaacaaaaaccaagaaaagaaaaaaaaactcttctaagaggatttttttttcctggattaaatcaagaaaatgggaattcaaagagatttggaaaaatgagtaacatgattatttactcatctttttggtatctaacagaaagaagatctggatattgtatgtgaaaggttcactactagtaaactgcagtcctttgaggatttagccagtatttctacctatggctttcgaggtgaggtaagctaaagattcaagaaatgtgtaaaatatcctcctgtgatgacattgtctgtcatttgttagtatgtatttctcaacatagataaataaggtttggtaccttttacttgttaaatgtatgcaaatctgagcaaacttaatgaactttaactttcaaagactgagaattgttcataaataaactattttacctgcagagacctctgatatatgtttcttgatggaagtacccagtaccacctatgaagttttcttgtcaaaaaatcaaatgtgaatctgatcattacttagatctaagtaccaatatatgaaaaatataggagacaaggaagcatggtaaatgatactgagattgggagactacatggaaaaagacttgttcccttcaacagatagacagcagggaaaaaagaatagagaaaggagtaaagaacctgtagattaaaagacatttaagggacatatgaaccaggtccagtgtatagatcttacctaaatcctgatggagcaaactataaaaaaatttttttgagacaaatgtttgaatacaggttgactatttgatggcattaaggagaaattatgaattatcttggtataagaatattgtcatgggtttttttttttgagtccttacctgttaagatacatactaaaatatttgtgggtaaaattatatgacgtataggagtatatgatttagaaaacggattaaaatataaaaggataaaataggatcttatattttgtgactcacttcctgttggatatctttctacccagtaaatatagtcctatctaggttttaatggctacatgtatgtactgtagtttgtttaaatggtttcctattgaacatttatgctctttgccattttttcctgtttaacgttctgtttttttttttgtttttttttttttttgagacagtcttgctctgttatccagactggagtgcagtgacatgatctcagctcactgcaacctctgccttctgggttcaagctattctcctgcctcagcctcctgaatagctgtgattacaggcgtgcaccactatgcccagctaatttttgtattttgggtagagacagggtttggccatgttggccaggctggtcttgaactcctgaccttgaatgatctgcccgccttggccttgcaaagtgctggggttacaggcatgagccaccacgtctggccttgtttaaggtcctgatgagtattcttataggtacactgtgtttcgtttaattatttccttaggataaatttatagaaataacattccttggtaaaagaatacatattttaaaaactgtattagtttcctgttgctgtcaaaaaatttccagaaacttagtggcattaaacaatacaaattaattattctacagttctggagatcagaagatacgggtcttactaggcctcactaggctaaaatcaaggttttggcagggctgtgttcctctatggaggttccaagggaccagagaaactactttacagtagttattttaagggaatgaaagtgaagatggggttgggcagtcaaagaggctgttacttttcatttttggcctttcagtagtttgaatttttttatcatatacatgtattactttaatttttaaaaagtaaaaagcagctgtgattcagtctctgtaatttagatcaatttacatcaaactagggtggtctcatgtgttgtcttgctcacagtgaccactagattattccaagaagggacaatttccaagacttggtttacactgagacggctcctgattttaaggataccttagatcaaactctaggaaggcagtttcattttggccttgcagttccctgggtcattttccaagcccatggcctcctggagtcttcgcctagctgtaggttatctttgtggctattatttcactgtaattatacaggaagatttattgagggatttctgtgtaccagccgtggttctcagcactttgtatactttgtattaactctgactcctgacagtaactctacagaggttctgctgttacccagttttacatagaaacatggccagcggacgcagttagaaaatggcaaagtggggattagaaactaggcagtttgactccagagtctgtgcccctgtccacttggctccactgctggggaagaggcctctgaagcagcaggaccatctgctgtgccgtgtgtagtggtactctatcttcctggtgtgatgttgtgttctactttgcattttcatgtctttccttatacaggtctcaaaatcatttacttttttttttttttttttgagacggagtctcactctgttgcccaggctagagtgtagtggcatagtctcactcactgcaacctccgcctccgaggttcaagtaattctcctgcctcagcctcccaagtagctcggattacaggcacatgccaccacagctagcaaatttttgtatttttagtagagattggtgtttcaccatgttggccaggctgttcttgaactcctgacctcaggtgatccacccacctaggcctcccaaagtgctgggattacaggcgtgagccaccccacccagccttatattttttaatgatgcacattagctcaattacataaaccagggaaatccagctaggacctggtgatttctgagcctgacccatgtgactttcaatgaactgaacttgccacagctgtatttactgtctactgagatgctgtcacacagaccccgtcatagcacagttcctgagttacatctttacatactgtagtatccttcttgtgaaaaaagatacagattccaaaggtctgagaaaccaatcttggttataaaggggaaaaatggtcatgggtttttaaaatttgttttgtcttaattgcatttcaaatttacatttctaaatgaataattgcttatataaagcagttttgattaacaatataaaacactatctatttggagtgattcctttacccatttctgaaggcaagttttaaaaattactagaagacacttcattgagaatattattaaacatgcctatagttctaccacctcaacacaattgcttattaacacattaatgttttggtgtgttttggactttttaatatgtatttttcacttgttctagtaattatgctacagattgatcatttctttttcaacatgtcatcaaagcaagtgagcaaagtgctcatcgttgccacatattaatacaaaatggaagcagcagttcagataacctttccctttggtgaggtgacagtgggtgacccagcagtgagtttttctttcagtctattttcttttcttccttaggctttggccagcataagccatgtggctcatgttactattacaacgaaaacagctgatggaaagtgtgcatacaggtatagtgctgacttcttttactcatatatattcattctgaaatgtattttttgcctaggtctcagagtaatcctgtctcaacaccagtgttatcttttttggcagagatcttgagtacgttttcttttctccttattgataaattgataatcctcaaggatgattattaggtgatactcttacttcatggattcttaaaagatatgatttaacatattacaagtgcctagcaaggtgtctgttacacgtaggtattttaagtaaatggtagctgctgatgtaatttctgcccctttgcccttcagttggggtattgctttggaccgattagagggctgtggctgggatgctaaaggttcatgtttccttagctggctcctgagccaccagctcccaccacctgtgtatacctgtgctagtttgccttcccacaagtagctgctggctatctgttatgctggtacagttttcagaaactgatgaatggcctttgaacagaacaaaaatgagattcagaataacaaaattgcacctttgtttttataagcactggccattcactagttgaagactggtaggaatacctaattcatgccaaaagaaagataatttttaaaaatcacacaggttgtttgtagattaaaagggaaaataggctaggtatagtggctttgcctgtgagtttgggaggctgaagtgggaggattgcttgaagtcaggagtttgagaccagcctgggaaacagagcaagaccccgtctctacagaaaatttttaaaaaattagctgggcatggtgatgcatatctgtagtcttagctactccggaggtgggaagattgcttgagcccagcagtttgaggctgcagtgagctgtgattacaccactgtactccaaccttaaaataaataaataaataagggaaaatatcttcaacaaaggatagttctgtctgtttctcagtcttcctcaacagataaatgtgtgaagtaatggaaggtggagatttcagattacacaacattaatgctaagggcgtttgactctgtgtgaattctaattgccctagatctagacgggctgatactattagaatcccctgtcactaactgaagacagagttgtaagttaatgccttcctagatagcctagattgtggtatgctgctgcatgctaaaatggctccccttccatagcaggatgaaatagagtcattatcttggcaaccagcccctgccaatgtgctctcagtctgcctttccagccccttctctctacctattcccagctgccatgtattctaaagcctctatgctttcatttttgtttttgccttcctggatggtctttcctgctgtctccacctgaaactattcctctctaaagaacagatgaattgccatctctctgggatgcttttacccaccctcactcccacctcaggctgaatggacccttctctagatcgcttagcatattgttctacagttaggtaaaaagtctacctatcactagatcaagagctttgtttttttttattaatttaattttcttttttttttttcttttttttttgagacagagtctcgctctgtcgcccaggctggagtgcagtgcacaatcttggctcactgcaagctccgcctcccaggttcacaccattctcctgcctcagcctcccgagtagccgggactacaggcgcccaccaccacgcccagctaattttttgtatttttagtagagacggggtttcaccatgttagttagccaggatggtctcgatctcctgacctcgtgatccacccacctcggcctcccaaagcactgggattacaggcatgagccaccgcgccgagccccaagacctttctttattaccagggcttccacagacctgacacatggtagttcctcaataaataattgcagaattactgaaaaattttactgttaacttaggcagtggtaaaaccattgtttggtagctcagaactcagcaagtaaatagcaacatttgctggaagaacagatagtttttcaaatccaattcaaggactgggtatggtggctcatgcctgtaatcccagcactttgggaggccgaggcaggcgtatccaggagttcgagactagcctgaccaacatggtgaaactccgtctctactaaaaatacaaaattagccaggtgtggtggtgggcacctgtaatctcagctacttgggaggctgaggcaggagaatcgcttgaacctggtaggcggaggttgtagtgagctgagattgtgccattgctctccagcctgggaaacaagagcaaaactccgtctcaaaaaaaaaaaaaatccaattcaaatgattatggaagtagtggagaaataaacaggaaaatgataaataattaagataatatataatatggctatattttaatctattgttgatatgattttctcttttccccttgggattagtatctatctctctactggatattaatttgttatattttctcattagagcaagttactcagatggaaaactgaaagcccctcctaaaccatgtgctggcaatcaagggacccagatcacggtaagaatggtacatgggagagtaaattgttgaagctttgtttgtataaatattggaataaaaaataaaattgcttctaagttttcagggtaataataaaatgaatttgcactagttaatggaggtcccaagatatcctctaagcaagataaatgactattggcttttgtggcatggcagcctgccacgtccttgtcttttttaagggctaggagattctttattgggatggcaaaagtcaatggcagggtagttgtcattgaaagaagattaagcttgaccccagaaggcatgggttagagcccagccttgtcactcaatggttgtatgtccagaggcaagtcacttaacatcccttaaccccagttttctcatctgtcaaatgaagcaaagaatacttgccctcttgacttaaagggtgtctgatgagacatatgactgtatcattagctgggagaaagtccatcgtgctgcctatgtatagtgcctcaagttggtctctttcccttctatgattacacaaagcactccgctgtcatgttatccatcccgcccctccattccaagtcccatctagagcacatcttcttgaagtccactgtaacctgcctaatcctggatgtgacgagccaggcaggaggcagaaaagaatgtgtgttttgcaatacatgttaagagacatcttgggctgggcacggtggctcacacctgtaatctcagcactttgggaggctgaggagggcggatcatctgaggttgggagttcgagaccagcctgaccaacatggagaaaccccatctctactaaaaatacaaaattagccaggcgtgatggcgcatgcctgtaatcccagctactcaggaaggctgaggcaggagaattgcttgaacccgggaggcagaggttgtggtgagttgagatcatgccactgcactccagcctgggcaacaagagtgaaacagggtctcaaaaacaaaaacaaacaaacaaaaaaaatcttttaccacggtgaccaccatgtgatttccaagaacttcaaatgatctaagaaattttgtgattattactagtttgaaaaatactttttttttttttgagacaaagtctcactctgttgcccaggctgaagtgcagtggtgtgatctcagctcactgcaatcactacctcttgagttcaagcagttgtcctgcctcagcctcttgagtacctgggattacaggcatgcgtcaccatgcccggctaatttttgtatttttagtagagacagggtttcaccatgttggccaggctggtctcgaactcctgacctcaggtgacccacccaccttggcctcccaaagttctgggattacagacgtgagccactgcacccagcctgaaaaatatctttgaatgccatgtgatactatacttgtcagtttacatgtgtgtcccactaaatcatgtactctcctgagcaggatcatgctttgtcttcatattttctgtacaaagcaaagactctgacacaaagctagcccccagtgcatagttgagaaatcagtgaatgaatgtgggaggcaggaaaaatgtcctttaattcttctgttaatgctgtcttatccctggccccagtcagtgcttagaactgtgctgttggtaaatataattggattcactatcttaagacctcgcttttgccaggacatcttgggttttattttcaagtacttctatgaatttacaagaaaaatcaatcttctgttcaggtggaggaccttttttacaacatagccacgaggagaaaagctttaaaaaatccaagtgaagaatatgggaaaattttggaagttgttggcaggtacagtccaaaatctgggagtgggtctctgagatttgtcatcaaagtaatgtgttctagtgctcatacattgaacagttgctgagctagatggtgaaaagtaaaactagcttacagatagtttctggtcaaggtttagccaccaattttgcagtttctctcatctccccaggaaagagcagttggtctttagatcaatgagagctcttttatggcagacaaaacaaagtgactctagccaacttgagctaaaaagaaatttagtggaaggctaggagttaccacatgaagtgtgtgcagctgccccttggagagaataagaaccagggtgcctctgggacttaacatcattactgtactccagttgttttcattcttttcctgactttgctctagagtcagtttcctaacagagtacattcgatgatcatgtgcccatatctgtggggagaagatttcttgattggcagtcttactaagggtgcatatcaagtagaatggaatagaggtagtttcctaaaggaagatgagaggctgttaccaggaggaggagaagggattcaggacagatgaaaacaacgttatatccatgatagacttacgctgctggtacagatggtacaggtggcttcagtataggctctccgaacccacatatcattgattatgatagggatatgttaactatttttcagtgtatatatgtatatgtgtgtgtgtatatatatgtatatgtatatatatatgtatgtgtatatatgtatatgtatatatttatatatgtatatgtatatatttatatatgtatatgtatatatttatatatgtatatgtatatatatttatatatgtatatgtgtgtatatatatatttatatatatgtatatgtgtgtatatatatatatttttttttgaaacggaatttcgctcttgttgcccaggctggagtgcaatggtgcgatctcagctcactgcaacctctgcctcctgggttcaagcgattctcctgtctcagcctcccgagtagctgggattacaggcacttgccaccatgcccggcaattttttttttgtttttttttagtagagagggggtttaatcattttggccaggctggtcttgaactcctgacctcaggtgatctgcctgccttggcctcctaaagtgctgggattacaggcgtgagccaccatgcctggccatttttcagtatttcttttttttttttttttttttttttttttgagacagagtttcactcttgttgcacaggctggagtacaatggtgtgatctcggctcaccgcaacctctacttcccaggttcaagcaattcgcctgcctcagccttctcaagtagctgggattacaggcatatgccaccatgcccggctaattttgtgtttttagtagagatggggtttctccatgttggtcaggctagtctcaaactcccgacctcagatgatcctcccgccttggcctcccagagtgctgggattactggcatgagccagcgctcctggcccatttttcagtatttctaaaaaaaatctaaagtgggtcaaacatttcaccttaatagaatgacaggtttgtacatcaagtttctttgctttttcttggaattttatactttttttttttttttggagacagagtcttgctgtgttacccaggctggagtgcagtggtgcgatctcagctcaccacaacctccacctccaggttgaagcaattctcctacctcagcctcctgagtagctgggattacaggcacatgccaccacacccggctaattttttttttttttttgtatttttagtagagacagggtttcaccatgttgtccaggctggtctcgaactcctgacctcaggtgatccgcccatctcggcccaccaaagtgctgggattacaggcgtgagccactgcacccggcctttttcttggaattttatcaatcagtgtcagaatattcattacctcctaaaaataaaggagttctagttggctgttttgattctaggtgtggtaaagtgaaatattgttacttaataaatgcattttgctagacacaatccttcggttcacgagctctgtagagaaaagagaaataaccgccaaccaagaaaagattgggagatactagaataagacccaggggcaggaagaagccagtgagaaggagggcatgttgagagctctgagagagaataaaagcaggggttgttggagctagcttctcaagatgtccttgaggcaaaccagacctttgggacactctgaaaataaaactgaaagtgaagagattgtgggccgaatgtggtggctcacgcctgtaatcccagcactttgggaggtcgaggcgggtggatcacctgagatcaggagttcgataccagcctggccaacatggcgaaacgccatctctactaaaaatacaaaaaaaattagctgggcctggtggcaggcgcctataatcccagctactcgggaggctgaggcgggagaatcgcttgagtccaggaggcggaggttgcagtgagctgagatcgtgccattgcactccagcctgggcaacaagagcaaaactctgtctcaaaaataaataaaaataaataaaaaagagatagtggcgtgatatccttgattctatcagcaacctataaaagtagagaggagtctgtgttttgattcagtcacctttagcatttttatttccatgaagtttctgctggtttatttttctgtgggtaaaatattaataggctgtatggagatatttttctttatatgtacctttgtttagattactcaactccactaatttatttaactaaaagggggctctgacatctagtgtgtgtttttggcaactcttttcttactcttttgtttttcttttccaggtattcagtacacaatgcaggcattagtttctcagttaaaaaagtaagttcttggtttatgggggatggttttgttttatgaaaagaaaaaaggggatttttaatagtttgctggtggagataaggttatgatgtttcagtctcagccatgagacaataaatccttgtgtcttctgctgtttgtttatcagcaaggagagacagtagctgatgttaggacactacccaatgcctcaaccgtggacaatattcgctccatctttggaaatgctgttagtcggtatgtcgataacctatataaaaaaatcttttacatttattatcttggtttatcattccatcacattattttggaacctttcaagatattatgtgtgttaagagtttgctttagtcaaatacacaggcttgttttatgcttcagatttgttaatggagttcttatttcacgtaatcaacactttctaggtgtatgtaatctcctagattctgtggcgtgaatcatgtgttctttcaaggtcttagtcttgaaaatatttatagtgtagtagaactattttatcctccaatgctccttcttttccttgtatttccattatcatcactttaggatttcacttatttatcattcaacatttattaattgcctctcatattccaggctttgtgctagaagttagggatataaagacaaataagatatttcctgcccttaaagactagattcgtgttgctaagtcttcattatcaagaaaagcataagtggggaaaagtgcttgcattatggattcctcatagttgctcccctctgcatgtaaaaatcaccatttccatcatagattcctagcggtctcaggactttataaagcccaaagtgcctatgtcataatatgaggaaaaatactgagacccttccatatatgggaggtatatggatgagacagctcctgacttcacttttcccagaaatctgaaaagcagcagcagtcattccagagcccagtttctactttgaagggcagattatttattctttgagctaacctgactgaggaacaattagtttgcttttaatttactattttctttttcttttcttttcttttttgagacagagtctcactctgttgcctaggctggagtgcagtggctcaaacttggctcactgcaagctccgcctcccgggttcacgccattctcctgcctcagcctcccgagtagctgggactacaggcgcctgtcaccacacccagctaattttttgtattttttagtagagacggggtttcatcgtgttagccaggatgatctcgatctccagacctcgtgatccacccacctcggcctcccaaagtgctgggattacaggcgtgagccaccgtgcccagccactattttctttctaattgttaatgaattaattttttaaaactgtgctcctagagcgaagggagagctctgtttacagtgtaacttttcagagcttctttaactagattttaagatcagaattagttgttgtgaaatcttagggactgtacaagattagaaatcctctatagcagcatttcccaaagcaggcttccagaacactagcctcatgaggcattttgggaaaaaagagtttgctggttcagtgtgtatgggcagtgccacaagccgtaccctccgttgaagacactcattccacacattactgcataaaaagcttccaccagccattcggcaaacttattgagtgtctgctatttcctgggtattgtgctatatggtagggttatagtagtgaacaaagaagaaatgatgcctgctctcagctgactttgcagttggaaagacacatgaaataattacgccattcattagcagattgtgctagatgcctcactggaaaaataaaggacatgatggaaaactctgtagggtcagagaaagggatcattagagaaggttctttgaagaaatattttttgaaatatgaaggataaataggaattaactaggtaccaataggttaggagtagagctttccagacagagggactagttcttgggaaggtctccagacagaaataagtgtggcttgtctgaggacctcttattcgcctattaaccttccctccccagtaaacactcctgggaacaacacacattgtagaaccacgttgtggtgctgttcagtatagcaagtaattcagcagagataagttcttggaatctcatctttgggatttagttactaagatacattcaagtttgagcaaaataaggtctcagagcttggattcattgttctgttccagcaattagagcagtacctggcacatagcacaagtgcttgaaaacactgactgagtagggtaggtgggtgagtgggtgggtgggtgggtgggtggatggatggatgggaggatgggtgggtgaatgggtgaacagacaaatggatggatgaatggacaggcacaggaggacctcaaatggaccaagtcttcggggccctcatttcacaaagttagtttatgggaaggaaccttgtgtttttaaattctgattcttttgtaatgtttgagttttgagtattttcaaaagcttcagaatctcttttctaatagagaactgatagaaattggatgtgaggataaaaccctagccttcaaaatgaatggttacatatccaatgcaaactactcagtgaagaagtgcatcttcttactcttcatcaaccgtaagttaaaaagaaccacatgggaaatccactcacaggaaacacccacagggaattttatgggaccatggaaaaatttctgatccataggtttgattaaacatggagaaacctcatggcaaagtttggttttattgggaagcatgtataatttttgtcctaagtctgtgctcagccctcccacatgtgctcattgctggttgactgttggagtctggttcttacctctaagaggaagcccaggagagggcataaagccagcacactgtcctcacctgatggtgtcagagtccttacgagtaagccctagccagaacattgctggaagagatcaagggccactgtttgaaattgcacagcaggatacggaaaaggggtaccttaggtataggcattgtcattaaagaaattgctaagatacttgagattttcctgtttaaggaatgagctttatgatacaaagagcagttctaaaaattagggagggaattaactaaattaattaggatatttctcaaattcctttacagtttttgtctctctgctgatatagtgtttacatgattgttatttactaaacaaatgctattttgtattgtgctccttataacttaattgtttattacaaggttttgatggtgacctaccaacaacaagtaatcccaaacacagtctgaattttttgttttccatccagaaataagatgaatctttccatttccgtgttttcagttttcatcatttttatcctataggttacttatctttattttaaagcatttcataataattttatagtttttgttttgtttgcttgtttgctgttggaaatggaatattccctccttccatttagactgctaaccagctgtaaatgtttcaaaatatgcatgttttacagcagttgttcaaagcaatacaggaacagtaaggacagagccagtcattttacaaccacattctgttaaactgatgtctattagcagggtttttcctattttattaggaaggacttacacctgatatataacaaagcttgttttaatcaaggctcagaaaatgtttttcattagtttttttcctaaccatgaagaataactgctttgtaacacacatgctggctataaagcagacaaaaaattcactgtaggtgctgcctgactggcctctgtccgtgtttctgttggggctgcttaccacagcctctgcattatcattagctagtgtgttcacaataccaagttcccagtagcaaagaaaggtcaagctcttacgcatgccattcatttatctacactgtgcaggcgcactcaggtggcagggacaaagaccactcctttggcgcatctcaagttcagaattctcagtagaggggctccagctgtccttttgtcaggtgcccatgcctgctccaggcctgtgtggtcaggacacgtgttacagagtacagtgacattaatgatggggccatggatatggtcagcactcagaggatgttagtctcttcattgataaagtcacaaccacttttcctgttggaaataaaaagatttgacgtatccttgtctacagcaacacaggacaacagataatcagcaggtcatctaaatctgttcagagagaaaggagagctgtttcctgaaaatacatcttcccctgattttagtcttatttttttctgcctttattgctttctaccctcttcaaaccagcctcatttcctaaattaccttgaatatgcattgacacttgtactgcctgaaattctggaaaactcagtatggctactccaccgtcagaacttcctgagcaaagttagttgctctctcggctcactgttttgttttgttttgttttcctgcctcaggtttatttgtacaaatagcacaggaggaccagccccatgcagatggtagcccaggggcgggggtagggggtcacaccagtccttctgtcctcatgttggcagagatatctactctgaagcctttgtaggggcctgggcacctttgggagcctgagctggaactgaaggtggagctgcagcctgggccttggtttgatccttggccttggcctttggccggcacagcctgagccccttggcaatacgggcacgagcacgcttcccaagcttgggatgggcaatgtaggcaagtcgatcgagcttgcggctgacaccctttgggatcttgggcttaacctccttgggctttacgagggccttgatagcctcggcacgtgcactcatggccttggcattgttggcctgcatcttctttaggcccttcttgttgtgcttcttggcaaagtgcatgttcctcaggaacttggggtccacccccttaagagattcgtatctttgtgatcggggtttcttgataccatttctgtgccattttcgggactggttgtgtgtggtgtggttcttggacttcgccatgtctacaccttaagccgcggctcccgaagcacctagaaccggaagagttggctcactatttagcacacacacacgtctataatagtgctggccacttggggttggaattagtttatttatcagcatgttgtctcccagcacttggtgtgtgtgatatgcagtatgtatttgcagaatgaaaagtctgagggctgacatcatatttcccactgtgcccagaaagagcacagttagtccacatgagctaatgggggcaaagggaagtgaggagggagaatgtactgccttatcatgttttctattacttggctgaagtaaaacagtcccaagccgatagtaagatagtgggctggaaagtggcgacaggtaaaggtgcacctttcttcctggggatgtgatgtgcatatcactacagaaatgtctttcctgaggtgatttcatgactttgtgtgaatgtacacctgtgacctcacccctcaggacagttttgaactggttgctttctttttattgtttagatcgtctggtagaatcaacttccttgagaaaagccatagaaacagtgtatgcagcctatttgcccaaaaacacacacccattcctgtacctcaggtaatgtagcaccaaactcctcaaccaagactcacaaggaacagatgttctatcaggctctcctctttgaaagagatgagcatgctaatagtacaatcagagtgaatcccatacaccactggcaaaaggatgttctgtcccttcttacaggtacaaggcacagttttccttcatttattcactaatttagcagaacctcactaagagcctcctatatgccaggctctgcgttagcaataaaaggaatgccatgcctcaccccatcaggaggtgctgatagcttgtaggcggagtggaaacagatgtgctctagaggctctaaatattacttctgctggggtcagttgggaagccacaacagctactgttcatcttccataaaagacaatcagccgggcacagtggctcacacctgtaaatcccagcactttgggaggctgaggtgggtggatcacaaggtcaggtgtttgagaccagcctggccaacgtggcgaaaccctgtctctactaaaaatacaaaaattagccaggcatggtggcgggcgcctgtagtcccagctactcgggaggctgaggcaggagaatcgcttgaacctaggaggtggaggttgcagtgagctgagactgtaccactgcactccagcctgggcgacagagcgagactccatctcaaaaaaaaaaaaaaaaagactgggttctgttctgtggaggttcttgtcttaacatatccactgttgattgcccagatgttgatgtaattaatttagcagtcgtaaatagtttagcacttgcattaaatagaccaaaccccatagtaggtatttgaaatacagaataaatgtgaggtacccctgctctaaaggagtttatagtccagagctgacttatggaggatttctttctattatttctgggtctgctactaatttgtctatttcatatcctaattatccttgttttcattttgattgaaagggggagagcatagaaattgtggtaaaaggtagttttattttttatttgagatggagtcttgctctgtcacccaggctggagtgcagtggcacaatctcatctcattgcaacctccacctcccgcgttcaagcaattctcctgcctcagcctcccgagtagctgggattacaggtgtgcaccaccacgcccagctaatttttgtatttttagtagagatggattttaccatgttggccagtctggtcttgaactcccgacctcaggtgatcctctcactttggcctcccaaagtgttaggattacaggcctcagccactgcacccagcctaaagttagttttagattaagtgttttcatgttttcccttgcaaagtaataaactggtcaagttatcaccttgttccatctccatattaatcagggtccaaacaggagatagaaaccatgcaacaatttgagtagttgaataaagaattataaacaggagattagagtaataggggattagatagtaagaggtgaagagataggaacagcagatataaagaacaaccatttcctcctatggctgagataccatcccctcaccacactcccccacctactcactgagatgcagaccttattgaagagaatgtaactggcttgctgcgaggtaaagtcaatgaggcgctccccagtaccactctgaggggatgctggggaaaactgcccatgagaagagggcacatgctgctggccacttgtgctaaagaacttgaagtctgataggagtgcaccctaacctggcatagaaaccctttcttcctgctgagtccctctagcaccttatactggcaaagctttacattgcaaacctccattatcacagagcaagcaatgaaagatggactcagagctgaggcgataaattgatagctagcatagcctctaaactgacttttatgactacattttatggatagaaagtgttcttatatatattgtttctttacataataggggacttattcatggctgcagatgagaaaacagatcctaagaagttaagtgacttgcccaaggtcacacaaagaattccactagttctaaaatgacagtaattacagttaacatacattgtatgtggcagatacatataaagcacatggcattaatttttttttttgagatggagtcttgctctgtcgccaagctggagtgcagtggcacgatctcggcttactgcaacctctgactccctggttgaagggattctcctccctcagcctcccgagtacctgggattacaggcatgcgccaccacgcccagctaatttttgtatttttagtagagacgtggtttcatcatgttggccaggatggtctcgatctcctgaccttgtgatccacccgcctcggcctccccaaatgctgggattacaggcgtgagccaccacgcccggccacttggcatgaatttaattcccgccataaacctgtgagataggtaattctgttatatccactttacaaatgaagagactgaggcaaagaaagatgatgtaacttacgcaaagctacacagctcttaagtagcagtgccaatatttgaacacactcagactcgatcctgaggttttgaccactgtgtcatctggcctcaaatcttctggccaccacatacaccatatgtgggctttttctccccctcccactatctaaggtaattgttctctcttattttcctgacagtttagaaatcagtccccagaatgtggatgttaatgtgcaccccacaaagcatgaagttcacttcctgcacgaggagagcatcctggagcgggtgcagcagcacatcgagagcaagctcctgggctccaattcctccaggatgtacttcacccaggtcagggcgcttctcatccagctacttctctggggcctttgaaatgtgcccggccagacgtgagagcccagatttttgcctgttatttaggaactttctttgcaagtattacctggatagttttaacattttcttctttgaacctagttataaaggtattgtgctgttgttcctaggcttagagtcataaggcctgagctcacttcctcactttgcctccatctggaaccttagaccaacttcctaggaaaacgagctgtctgaaaacagaatagggtgcctcttcaatgtgctcttcactggagatgttcaggaggaggctactcccacctacacagggtgcagtggagggtctgggccccagggaggcagcaggaagagtggaaagagcggaggctctactgttggacagacctgggttaccagccgtgtgactagccttccctggcctccatatccccctcagtaatgaaggaatgtgtcatccccaaatccagggacagttacaagcagtcagtgaacagaaagtgtctggtacaggttctaagtgcttattattctaagtcacttcacttacctgagttctcagttttcctatctataagataagcaggttggataaaatgttctccaatatactcctggtcctgagatgatgtgattgtgggcagccctttaatcatggtgaagatgttcatcataagcacactgaaactacaaaataggaatataaatattttctccattaaattatgctggatcctagaagcaaaaactggaactgtgaaaccctacttcacagaaaacttaaaattcccaagcagatgaatgcttctcggaaggacactgacagttacctacctggaaagaatctagatggaggtggcatgggcactaagcggtgagattaaacccagttagggcagccccaccagccttggaacccacacatctggagattgttgatgcagagagaaaggttcctactggtgagacctgaaagggatatgtggcaggtgggaggaagaagttctgtctggaaaccaacccttgttcctccgttattgattgactcctggtaccaacatgagccctaggtcttatagaggccataagtccctatgccttatagtgcccatggatgagatgaggccacacatgcccccagtgggttaacatgtctagcgtgggtaaggctcttggagcactatgatacacaggaaatgcccagtaactcttagttggtttgatatctgttcccattgctcacttaagctcagtgcccctttactgatccttttattctgcctccctctgcacatgtgcattgagactcctatctgagacacacactgtgttgggtgcccagggatgcagcatagatgttgctgccttccacagaagcgctcatggtctgctagagaatatatcccatgggagagaaaaacagactcgggagaatatagcaggggcccttgtcctggactttggcagttaggaaagggagggaagagacatggaggctgggacccaaaggctaaataggaatttgctgggccaaaggggagggggaatgaaaagagtgtttctggcagaggaaatggcaaggataaaggcctggaggcgcaagagaatatgtgtttgaggatctgaaagttgagtgcagtgggtccagtgttctctaccctggctgccattagaattacctgggaaacttttagaaaattccagtgtctgggccctccctaaaacaataaatcattcttgggtggtggggtctgggcatcaggattgtttaaaaccctccccaggtactgtcatgtgcagctggggttaagctgtgctggggtctgagtatggatctgttagggcaagtggcggtgatggagttgaggctgcagaattcaggccaaatagagaggttttcatcaggatattaaagagtttagatttcaatttggtgggaatggatgggatcttatttgcattttatgaagagctccctggttgcaatatcagaatggattggagaggagcaagatggaagcctacagtgatttgggagaagtggtgagggacttgagacacaggaagtagccccattcactaatagttgagtatgtagatttgctaggacctggaaatggtttggctggtggggagtgggaagaaaggcccaaagtgtgaaatgaagatggagagcacattgcctagcccagagtgattgccatttgctctgtcccagttgaggtccaaggggttggccagagatcatggagtctgtggctccatggggagaagaacctctcagcatgcctccttgtcttatcctgggttagtcagattcattttgttagattacattttttttccagtggaactctgcttaagtcctgaccagtatgttttcagaaggatcagagggcctgcccttgtccattggtgcatgacaccagcttggtgggttccttgctgctccctgttttcatagggttatcagaataccttctctccctgccaccagcaggtcacactggctcctgactttttggcccatggaaccaccatctttctgcttcttagattgtgccttgtactccactgatcatggccagtacatcagaagccctggtttgcagtgaatgcatttgatatggaaatcaggaaccctggggataccactcatcatatttggttgctgtgtttttcctccaatctttcaccataacaacaatcaactcaaaagatttctataaccacttgtgtgggggtttctccccacacactaaacaagcagtcagttccagagtggacagcagctggtctcctccaatttaattccaacactgtctacttggagatagcattagatcccacaggttgagggtgcagtcccctagactgcccccagtctcctgcttcagacaccagtcacaagtccaggactctagaagttctgaccagtttcaagttggggttcccacaaccccccactttatttttgattaatttgctggagtggctcatagaactcagggaaacacttagttttctggacttattacaaagatttaaaaagataccaataaatagccaaataaagagatatacagggctagatctggaagggtctggagcgcaggagcttctgtccccatctacttggctcccagcagatggatgagttcttattcattttcttgtcagcttcgacatgttcagctctctggaagcccgcaaactcttgtcttcttgggccttttatggagacgtcgttaggcaggcatgattgaaacatggacaactgtgtcgaaatatgattggacataaaggggtctaaactcagtgaggcctgtttgttcagattcttcttggcctctctgtggccattctttcctccaggatatggggcaggacccctatggaatgagggtcttatgacccacaatcaaattagagtcctgccttgggcaagtgaaaggaaagcaggagaaggtaagagaaattctgttgcctaagaccttctgaggcctaaagcaccccaacattataacagaagacgataacaggactatgggagttatgagctgggaaccttggacaaaaatatatacatattaaataaatattaagtgtatatatatacttacgtatattaagtgtatgtgtgtgtgtgtatatatatatttttttaatttactggttggttttgggaagcagaaattaccataactactcttaaaaatcttttaagtctctttgaagttagaaaagtcactgtacctttttgtttccattggccctgtacttcttattataccccagcaggaggagcataatgtgttgttatatcattctggtgataagattcataagtgggttcagctggtgacagcctgattccctcattgtaaacttatccatcaacatgtagcttaatcgtttcaccttttgtgatgaccattacctgaatcagttatttcattagattgcaagattatgcttttctgattttatcatttcttctgtattgactgtaattctttggtatagaagaactttcccttgttaatagctatttggttgtcctgaagtacagttcttactagaaagtaagaccaaatgctgaattatatccctctagctatcaattttcgaaggaatgaatggtgtcctagtaatttccagtggtgtttaattacgttttcccttctctttctccttctcttattccctccctctccatctcctccctcctcactttcagttttttgctctttcagtattttgtcatagctgttaacagagcaacatattttaatcaattgtagtcatttttctttttggtgctcaaattatcccgtcttagtcccatggaagcaagcccttggagctagggccctctaccttttgatggatttccatttgtcttgataatttccttgtttctgacaagacaagatgttgcaggcacattttatactttcccagcccaaaccctggaataggccttttctccgaggagctctagttcattttagtgggaaatggtatttagagactataatctgggatctgggagtcctcattgctactgagtagtcattacttttaggcttttccagtggtcagagctaggaaatatgtatatttaaaaatggacagttgaatggttgttgccaggagctgggaggaaggggaagtgagaaattgtttaatgggcacagagtttcagtttggggaagatgaaaaagttctagagatagctggtggtgatggttgcgcaacaatgtaaatgccactgagctctcatttaaaaatggttaaaatggtaaattttatatatattttaccacaataaaaaaaagtcttcttctgggagcacccccccaagacaaaaatatgaaaattttacactgatacttccatttcaagataattttaagattataaggattttgcttaattcttgaattttatacctgtaaaccttttatacttcaaatttcgggcagaattgcttctataacaatgataattatacctcatactagcttctttcttagtactgctccatttggggacctgtatatctatacttcttattctgagtctctccactatatatatatatatatatatatatttttttttttttttttttttaatacagactttgctaccaggacttgctggcccctctggggagatggttaaatccacaacaagtctgacctcgtcttctacttctggaagtagtgataaggtctatgcccaccagatggttcgtacagattcccgggaacagaagcttgatgcatttctgcagcctctgagcaaacccctgtccagtcagccccaggccattgtcacagaggataagacagatatttctagtggcagggctaggcagcaagatgaggagatgcttgaactcccagcccctgctgaagtggctgccaaaaatcagagcttggagggggatacaacaaaggggacttcagaaatgtcagagaagagaggacctacttccagcaaccccaggtatggccttttgggaaaagtacagcctacctcctttattctgtaataaaactgccttctaactttggcttttcatgaatcacttgcatcttctctctgcctgacttgccctctggaatggtgctggaatggtcctgtggccttgtccactgtctgcctttgaccataacttgaaagtcacccaccatagtgtcctttgaaataacttaaatgtccacagttccaagcatgagttaaaaacacttcagaatgtagagtagttgttcaattgaataaacacacacaccagaaaaaaaagcaagtttatcttttatttttagtaaagaattttgatagagcctcaacaccagaaatggctagagagagaagcctaacatatctggaggattatttttcatcctacttaaagctgctttcacttttttcaggaaaaaacacacgttctgaatctaatttataaaactccctggccgggtgctgtggctcacacctataatcccagcactttgggaggctgaggcaggtggatcacctgaaatcaagagttcaagaccagcctgaccaacatggtgaaaccccatctctactaaaaatacaaaattagccagacgtggtggcgcatgcctgtaatccccgctactcgggaggctgagacaggagaatgacttgaacccgggaggcggaggttgcagtgagccgagatcgcgccattgcactccagcctgggcaacaagagcgaaactccgtctcaaaacaaacgaacaaacaaaaaccccaaaaatccctgaagtacgtgagctagtggtgaaagaaagctggagaaaaggagcaggaataataataataataataataataataaagattgtcatttaattttgagtacttccagtgtacactttgcaggtactctaagacattacctcactgaaatctctaaggtagatattctttatttaaagtgtacttgtatgaaacctggagctcaaggtgaaggaatttgcccaaggctgcacttgcactatcgtggcactaattagccgtgtgaactgggacacgttacttcagtttgctcatttctgagtcagcctagcaagatgacttctaagaattttttccagccgggtacattggcctgtaatcccagcacttcgagaggccaaggtggaagggtcacttgagtctaggagttacacacaacacacacacacacacacacacacacactagccaggcatggtggcaaatgcctgtagtctcagctactccggaggctcaggtggaaggatcacttgagcccaggaggttggggctgcagtgagccatgatcacgccactgcactccagcctggctgacagagtgagatcctctgtctcaaaaaaagaaaaaaaaaaagatttttttccagggaataataaaggaagctaatatttatggagcatctacggtgtgccaaatactttgcatacgttatctcatttaatgctcttatccctgcagggaaagtattaacatttgtttatcacttgcagaactaagtgatatttaccacagagtagacaaatattttcaagcccaaaatcaagtggtatcacttttctgctgagaatgtttcagtggtttcctttgctcttgggataaaacttaaatccctcaccctacccttgctccaaccctccactttccttctcccatgtggtgatttggccatacagctcttgtggctgatctgaactgactgagctttttacccttttgctcttgctgttcttacagcctgggaaccccctggttacctcttggcttggtgtggtggcttacatctgtaatcccagcactctgggaggccaaggcggacggatcacctgaggttgggagtatgagaccagcaagtcacctcttgccagtggcctttgtccattgagtctgaagttctttctcctctcatttccccatcattctattatgctaccttgttttattttcttcattgtgtttattgatacttaaaatgatctcttttctgttgctgtttgactctcccactagaaagtaagcattgtagatcgggcactgtggctcacacctgtaatcccagcactttgtggggcagaggcgggtggatcacctgaggtcaggagttcgagaccagcctggccaacacggtgaaaccccatctctactaaaaatacaaaaaatagctgggtatggtggctcgtacctgtaatcccagctactcaggaggctgagacatgagactcacttgaacctgggaggcagaggctgcagtgagctgagatcacaccacagcactccagcctggaagacatagtgagactctctctcaaaaaaaaaaaaaaaaaaaaaggaagtaagcattgtgagggcaggtaccttctctgttttgttcattgctggatgtagttagtatacagcagtatctgatggatggatagatggaggaatgaatgaatgagacttcacaaattcagctcacttgctcaaggccctgcagctctacgggatgaagctatactccagagtcctgctacattggctgtgtggccagctgctgggatctgagggttgtcagataagcagtctaccagagaacagactgatcttgttggccttctgccagcacaggggttcattcacagctctgtagaaccagcacagagaagttgcttgctcctccaaaatgcaacccacaaaatttggctaagtttaaaaacaagaataataatgatctgcacttccttttcttcattgcagaaagagacatcgggaagattctgatgtggaaatggtggaagatgattcccgaaaggaaatgactgcagcttgtaccccccggagaaggatcattaacctcactagtgttttgagtctccaggaagaaattaatgagcagggacatgagggtacgtaaacgctgtggcctgcctgggatgcatagggcctcaactgccaaggttttggaaatggagaaagcagtcatgttgtcagagtggccactacagttttgctgggcaagctcctcttcctttactaacccacaatagcatcagcttaaagacaatttttgattgggagaaaagggagaaaaataatctctgtttattttaattagcattaattggtattcttgttaaaccataggagtcagagtaaatcagccatttcaccaattttcagtttgtttctgtcttagctaacagcagtgtaatggtcagcaaaattcttatcttgtgtactgaatggcatgtcctgttgctgaaagtgcacaggcttgggaggtagccatgagctcaaatcctggcactaccacctctcttgtgtgaccttagactcctgacctttctatgcctcagttctttcttacctataaaatgaaattaattttacccttaaagatcatcgtgctgattagagataaaatataaataataacacttgttacagagcaaggagttgacacttttatattctgaagacaaagtggtaaatcattatcatctatgtcagaaatagcttttgagaatacctgagtatagaactatcttgatccctgttacttcaaaactaaaataatggttttaggaattaaaaggtgaggctagtcacctccaagggatgaactgactcagggattgaggtatataacagtgaactggtccaaacaacagtcctgaccccactttatgagtgagactatgagtaatggtctaagtgtagacatcattgtccagggctccagtaggcagctctgtacttgagaatttagcagtgacccttctatttttcatctattatacctttttttttttttttttttgacacagggtctcactttgtcacccagctggagtgtggtggtgcaatcatggcccactgcagcctcaacctccctgggcttaggtgatcctcccacctcagcttcctgagtagctgtaattacaggcatgtgccatcatgcccagctaatttttcttttcttagaggtggggttttgccatgtttcccaggctggtcttgaactcctaggctctcacctctgtcttccaaagtgctgggattacaggtgtgagccaccacacctggcctattacacatttcttaattaaagtagtcaaatttgaaaactgttacaaagtgtatcttaaaatacgacgatctggtttaatttttaaaagatatgagtagccaaggagcaattctgtgcctttcccactagtccctaaccttttaaagcagctgcttcttggctgggctcagtggttcacccctgtaatcccagcactttgggaggccaaggcgggtggatcatgagtcgagatcatcctggctaacacagtgaaaccctgtctctactaaaaatagaaaaaaatagctgggcggggtggcggatgcctatagtcccagctactcgggaggctgaggcaggagaatggcatgaacacgggaggcagaggttgcagtgagtcgagattgtggcactgcactccagcctgggcgacagagcgagactccatctcaaaaggaaaaaaaaaaaaaaaacccatctgcttttgattcagtggcttctttaattttgtcggtctcagtcaccatttgtctaagcaaattcaggcaggcttcaccttgcctttctacatttgttcccttttcttagcattttgggcctttgtttacacgtgggaaaagacccacaggtcgtctctccctttgggcaggatacaggcttcctgtgactgaggttttgctagctgtagaagtggctgccaattggcttctggtttttatttccatgatttgctccagtggctcttcccttccatcattgttagctttcaagctaggaacttttaaaatgcttttaaataaaagtgagctgttacttgatgcatttagcagtcttcctcacagtggttttgatagacagactccctcagtttggaatttatgagttttctttaagggtttgtctccctcatgtatagcaggctgttgaaagttacaatgtcaataactttctgaatagtatcaaactgttttcagtgcagtgtattaacaaaactaacctgcctcaagtttggtcagctttggagtcttactgaggctaaaatgataaatctaaatgatttaaaattgtgtattcctacacagtatctcacttaattatgtaatagtcttgtgagtgaggcagagcagatgccgttttctctattttaaagatgaggaaaatggaatggaaaatggaaaggacagactaattgcaacatcctcgcaatcaaaaacaggcccaggttcatgccttgttggcagtgggttgctactggctgtggccttcatgcaggaaggctagatgcataaccaggtcaacagcccgtgcaggacaagcacgccatgtaattctgattccatcgactgaggctggtgttttcaaacgtgctggtgtagggtcttacagacagagtcatctgtgctatggggaatggaatgtgctcttgctttggagccagaactcctctgaagctcccaccacctacaccattcagaggccagacagaaatttgttcaccattttgggcatgattttcgtgcttttgtaaaatgtgcttcactgcagcccttactgggctgtggtgatgaacacttaagatactgtgtgtgtgctttataatctgtaaggcactgttcaaggggagggacctctgccatgagcccctacccactggtatctggttgacatccaaagccccagcctgggagaagctgattctctagttgaatgctgtatagggatttgactgaggctcagatttggtgaggaagaccactaaccttaacagaccaacaggctggctactccctgatgaagttccccaggccatgaaagaagtaagagatacattccttgtaacagctttcttagttgcacctgtatgattatttgatcagtgtgttgtctgtgcagggatcatgtctgtggagctcaccacctcgtcctcggtgctgagcagagtgcctggcatgtgtactcagtagatatttgctaagggagcgagtcagtgattgagaggagcagcctgggaggtaaagccctagaatctttattttaaagggatatcaaagttgaacattcagttagacagttctcttgagtccagggatttacccatccatggtggacacactttcagttaaaaagtaaggttaattttgacaggttgcagtatccaggcaagcattctatggaataaggctcatctcagggattagtaatgactgaattaacttactgctagtcccataattttgacgttaattaatggggttaagaaatgtcataagctatttggtaccatttaaagtgaaaatacccttaacgttttttgcctccagatatccacacttaatttcattttcttgctctttggtgaacagtcctgggtctgaatgtatatatccatggtttgtcactaggtgacaggtttttttggaacaagaaatcagttcagtgaacatttgtcaagtatcttctctgtaaaaagtgtaatgtgccaagctcagaagtaggaagtgaaatggataaactatgacccctgccttaaagaacaccatggtgttgtatgggaattgtttaggtagaatgaaagaaatcctctaatagagatatgaggccagttcagcagaaagccagggtgagatctcctgagagggatggaagggtgtcttgatcatctctggtagcagcaaaggcactggcatacagtggccactggaagacaaccagcaggggatgggggcgtttacccttgcaagtgagcattaggaactagaggactgattgccctttcttcagctttggtttcccttgctgcagaaaaagatgctgagactcatggcctcggttatgaactcagatatgtggtttggctttgaagcacagatggattttgtccgattttggcagggaaatgcctacagacagcactatgggcatatttaggttagggacgaaatgcaagttgattaagtcctgataagaggctgtgaagaggtccaagaagcctcacaatgcccaatgaagaaaagccctgtgcttggtgctgccgcctcccttccccgtcctgctggcagggctgcgcttcagtagctctggatgcgtcagagcagtccatgaacattctgtgtggaaaatctctgactgttttagtggattacactgctctccctttcctccagtgcctcgttattcagtattatttgatgttctccagcttttaaaataatcattttccgcctacgcagaacatcctgtagagacgttgaggttccagtgggaacagagaggaatacttattctaaaaatgaagaaaataaacctttttttatggagtgggtgatagtattgcagaacttctataatagtatgagaattcacttgtggtgccaaagcttaaaaaaaaagtatagtaaaaacataatgtataggcttattgctgtgctatgacccatgccccgttttctccaacctctcttgtcctcactcttcctttttgctggtgatatttttacttatttcatgaaaaaaaagataacatatacacacacatagatatatgcacaagtatatgtatatatgtgtgcataacacacataaacatatacattggtaaatttaaaaacatatttatgaaatatatgtagcatctacagaaaaacatgaacacttgtgagaatagcatctgcctaaaaaataggacatcaccatcacctttgaggctcttatgtgctgctcccctgtgccattcccttcccttcttccttagaggtgattactattctaaattttgggattattatttcctttttttattatagtgttttaattacagttttattacctgtatttgtattcctaaaaatttgtttacttttgcaagctttagattttataaaagtagaattacactgtaagtttaatttttctgtaatttatatatagctacacatatattcctaagattcatccatcttgttacatatagctctggtttaccttttctgtataatatagattctgcttcgtgaatttacagttcattcattcttctgttaaaggacagttggaggactcatatggcctcagtctctgtgtccccacatgccaccctgcttcccagcctcatatgagttgattggtggcctggcatactggatgagaagctctaggtcatatatttaagagagttattgctgggtcataaaatgacagattgttttccagaggggtcatattgatttaaattatcaccaacaattatattgtcagatttttaccagtttggtgattgtgaaacagtgtctgatggtagtttttatttgcattttcttggttgaaataaagttgtgtatttcagccaggtgcgttggctcatgcctataatcccagcactttaggaggccaaggtgggcagatcacttgaggccaggagttcaagaccagcccagccaacgtggcaaaaccccatctctactaaaaatacaaaaattagatgggtatggtgtcacatgcctgtaatcccagctactcaggaggctgaggcacaagacttacttgaacccgggagatagatgttgcagtgagccgagattgtaccactgcactccagcctgggcaacagagcaataactaaataaataagtaatcaattaataaataagtatatttcctcagctgttaagtacctgttcaagttttttacccaatatttgatgggctctttttttgtcttttctaattaatttttggagtttttgatatattctagatagtaatgagttacatgaaaatatccctagtttagggatcctctagtaactttttaaaatgaatacttgttttaggaacagaaattcttagatttaatgtaggcagattttatcaattgttctttacagattggctttgtagcttaagaaatccttcctaactttgcaataattaaagatatgctcttagattgtttcctaaaagactgatacttaagcctctagcccacctggaattgattttcacagatactacattttttactagttatagattggccccttcgtagagcaagtccgatagctgccatttttatggcagcatgtgctcacttagtgtctctgtcaaattttggtaattctcacaatatttccaactttttcattattactatatctgttatggtgatctgtgatcactgatctttggcattactattgtaattgtttggggcaccattaagctcactgtcttatgtgggcataaaccatgcccacataagacagtgagcttaattaataaatgtgtgtgctcagacccctccactgactgggtgttcacatgtcttccttactctcctcaggcctccttattccttgagacgcaataatatggaaactaggcaaattaataaccccacagcgtccacaagtgtttaagtgaaaggaagaggctgggcgcaatggctcacatttgagctcacaaatgagcccatgctcatttgccattccaaaaatcccagggcccttaagaattatgctaactctactctgcctctgctctataaatggaacaacaaagcctagatgacagcacatctttttagaacatgatttactgaatattttaagcccattgtggagacctactgctcagaaaaaaagattcctttcaaaagcctgtaatcccagcactttgggaggccaatgcaggtcgatcacctgaggtcaagagttcgagaccagcctggccaacatggtgaaacacgtctttattaaaaatacaaaaattagccaggcctggtggtagatgcctgtagtcctggctattcaggaggctgaggcatgagaatcacctgaacccaggaggtggaggttgcagtgagccgatatcatgccattgcactccagcctgggcaccagagtgagactacgtctcaaaaacaaaacaaaaaaaaaaaactgaaaggaagagcttaatgagaaaggcatattaaaagccagtataggttgaaagctaggcctcttgtgcaagttagccaagttatacatgaatggtaaagcaaaacagctttattgctgtaataaagaaagttttagtggtctggatagaagatcaaatcagtcacagcattcccttaagccaaagcctaatccagggtaaagccctaacttgcttcaattctttgaagactgagaggggtgaggaagctacagaagaaaacttggaagccagcagagattgatgaggtttaagggaagaagccacaagtgctgatgtagaagctgtagcaagttatccaaaagatctaattgatgaaggtggcttacactaaacaacagattttcaatgtagacaaaacaatcttctattagaaggtgtcatctatgacttacatagttaaagaggaaaagtcactgcctggcttcaaagcttcaaaagacaggttgactctaataggtactaatgcatctggtgactttaagttgaagccagtgctcatttgctattccaaaaatcccagggcccttaagaattatgctaactctactctgcctgtgctctataaatggaacaacaaagcctagatgacagcatctttttagaacatgatttactgaatattttaagcccattgttgagacctactgttcagaaaaaaagattcctttcaaaatattactgctcattaacaatgtacctggccaccctagatctgtaatggagatatataaggacatgaacactaacacagcatccattctgcaacccatggatcaaggagtgatactgactttcaagtcttatttaagaaatacatttcatagggctctagctgccatagatagtgattcttctgatggatctgagccaagtaaattgaaaacctctggaaagaattcatcattttagatgtcctgagaaacattcgagattcctgggaagaagtcaaaatatcaacattaacaggagtttggaagaaattgcatccagccctcatggataactttgaggggttcaagacttcagtggaggaagtagctgcagatgtggtggaaatcacaagaaaattagaattagaagtggagcctgaggatatgactgaattgctgcaatcccatgataaaatttgaacagatgaggagttgcttcttatggatgagcatagaaagtagtttcttgagaaagaacttaattctggtgaagatgctgttaatattgttgaaatggcaacaaaggatttagaatattatataaacttggtaaagcagcagcagggtttgagtggattgacactagttttggaagaatttctactgtgagtaaaatgctatcaaacaacatgacaagctacagagaaatctttcatgaaaggaaaaatcaattgatgcagcaaacttcactgttgtcttatttcaagaaattgcaacagcttcctcagccttcagcaatcaccaccctgatcagtcaacagccatcatcagggctagatcctccaccagcaaaaagataacaattcgccgacagctcagatgactgttaccattttttagcaaaaacctttttaattttatttatttatttattggagacagagattcactctgtcgcccaggctggagtgcagtggcacaatctcagctcactgcaaccaccacctcccaggttcaagtgactcttgtgcctcagcctcccaagtagctgggattataagcatgtgccaccacgcctggccaatttttgtatttttagtagaggcaggattttactatgttggccaggcttgtctcgaactcatgatctctggtgatctgcccacctcgggttcccaaagtgctggtattattggcatgagccactgcgcccggccagcaaaaaagtgtttttaaattaagctacctacgttgattttagacataatgctatttgcacacttaatagattacagtgtggtgtaaacataagttttatatgcactgaaaaacaaaaaatttcacatgacttgctttattgtgatattgactttattcctgtagtctggaactgaacctgcaatatctcagaggtatgcctgtatctacttgttctgtgatacttgttattgtcagtttgtttggatttaccacatattatttgatcataattctttcctgtagatgttttatggtctgcctaaacctttagtggggcctttgatggcttagtcctttcaggcttaagacaatagaagtttatttctcagagttctaaaagctgggaagtccaagatcaaggcaccgacagatttagtgtctagtgaaggcccgcttcctcatacatggcaccttctagctgtatccttacatagtggaagggaatagctagctctctggagtttctttcataagggctaatcccactaatcccaattatgagggaagacctaatcacctcccaaaggccccacctcctaatagtatcaccttgggggttaggatttaacatatgaattttgtggggacacagacattcaaacaatagccatggcaaacttttttgctttgtctaattcactcttattttgaaaagtatttgtgttgggtttaaaactccagattggtaattattttttcttagtgcattgaaggtaatagtgtatcattttctgatttctactcttgctcttgaaaattcagctatcaatcttaaaatttattacctgttgaaaatccagctaccagtcttatattttatttacttagtgggtaatctctcttctgagtacctttaagatctcctttcagaaataccatgtagtaaccctgtgtgtcacgtgtggattttgttgggcttgctagctgagacttgacagttttcatcacttctgggatattctcaggtattttgtcttcaaagtcttcagatattgtcctcttcctgccctctctccgactccttctggaacatgagttatgtatttattatctcccatgtgcataagttatctttacatattttcaatttctttatctttctgtgctacattctggataattttgttgatctaccttccagttaattagcttgttaactttgtcaaatctctttttaagtctatcttgatttttcttttcaattattgtatttttcatttttaaaaactttatgtgctcttttggaaatcttgatcccaggagatagtggatagtgtcctgctgcttactcatggttttaatagttcttgagcatgctgaacatacttattttatgttatttgctaatctttccaattcctgaaacctttacagatctcattctgtggattcttctggattctaattcatggggcattttttttgttttttgttaattcctcatactttatctgtggggaattacttgaagcctgggttgacaatgaaattctgcagagagaatttgcatttgattctactggaggaacagtcagccccgatatcagtttaaattaaaatctctgcttaaggttttcaggcaacctgcttagcatgaatcctggctggaaaagcatgtgaggaccagtttatgattacacattcacagggtgtcatgttttcttccaacaccaatgctagaggtggcagttttgcttactgcccttggagggacaggggagtgggcatgggcatagtagtatggttttccttttcactgggggtgcagcccttggagtctcagcttaatgtgttggggaagtggtctcctattagactctccatttcaaaccattccatgattttgtcctccttttgccaccttccgagcctgtaaaaactaatgtttgtgattcctgaggtttctctaatgtcttttaataaagttgacctcagagatctcgttacctctctgagttcctgctttgtcttagattttgatccttgagtgttctttaatcttttagcaattccttgttgcatgttaaaagattagttatattttattcctcatttgtgttcgttttcaccaggaggctcaattcaggcttctttgcttacttggtgtctctagttctggtgcctggtgctttggtcaatgaagtggggttggtaggattctattacttacctgttttttggttttattttttgttttgcagttctccgggagatgttgcataaccactccttcgtgggctgtgtgaatcctcagtgggccttggcacagcatcaaaccaagttataccttctcaacaccaccaagcttaggtaaatcagctgagtgtgtgaacaagcagagctactacaacaatggtccagggagcacaggcacaaaagctaaggagagcagcatgaggtagttgggagggcacaggctttggagtcagacacatgtggtttcaaatccaagttcgaccatttcccatttatttgactgtagacaagttacattcctaaactatgtctcagatttctcatctgtaagttgtggtattactagttaacatgcaggggttttgtttgtttgtttgtttgtttgtttgtgagggtaagaaataacccaagaagcctagtccttggtagttgctcagtgccctataaatgttgtgaaccaggtggtgagggtttggtgctgctagagaattctggtatctgctctgtgcaacagagtactgtaggtgatgcaagagaaagaagacctgatgccttctttcctcccagctttgagaatggagcaaaggcctaccccagccaccaagtgagccagtgggcttgatcagcacaggaaaggtgaccccggcagtttcatttgactattgcatggctggcaacatttctattgattgtttccagggaccttggcggatgagctcctgttgagtctagcatctctgttaaatctgttctcaaataggtaatgcatatgggaggatgctgccaccttgcatctactagacatcacctatctactgtgagactctccctctaagccctgctgtggcctcagagtgcttattggccctgtgagtggggcagccactatacattgcatggagttggtacatgagatagaaacctattcgccatcccttgaaactgccccagtccagaagcttcctgttagcacatgtacctccttgtatgtattcagaactcattccatttaggcttggaaacccgtttggtgcaactctgttcaagttccattgtctgctttgagaatgcttgggcttgtatagtgagctgtcactttttaatttgttaggaattctactcgccttgctttttcttttccagcatgtttaagggaatgacctccaaggccccaaatcacagttgtattcatgttctttcatttcacagatacaatccaggccagtcccagatttgcagctgttaataaatgtgaatggttttccagtaagggggtagaaaaacatagggagagaaccgggttcagagttcaatatctggattcaagtccttcctttagcactttactaactgatgtagaataagtcagctactcaataggtgcctcagtttccccaccaaaatgcagacatagaaggtgctttgtctgctttgatgagaagtctttaagcaagtctatggggttcaatgtgttttaagaactataaagtaccatataaatgtggcctttattcccattgtgttcttggaagtaattcaatatagtgtgtacttcatagctgcttttggactattgccagccagtgtatcatcctaaactacatgtcagcatagtataatcctgccttaggtctacttttgattatttaggaagactccctgcccttcctatacatttcacataatttttaataagttgtaaaaaagtgatttataggattctttgtaagtgggggaagttaagcagacaaaaagtttttaaatcttactgcagagtgtcaggaaccttttatagcaccagacaggtagggacagaacatgagtggcagcaagccagacttggtcttagtgctctaacctgtctgttagaggctggccagtcagacccctggttgaagacgttgggaatcccagctctttggaggggtaagagattttgttagactgttaaccagattccacagccaggcagaactatttctgtctcatccatgtttcagggattacttctcccattttgtcccaactggttgtatctcaagcatgaattcagcttttccttaaagtcacttcatttttattttcagtgaagaactgttctaccagatactcatttatgattttgccaattttggtgttctcaggttatcggtaagtttagatccttttcacttctgaaatttcaactgatcgtttctgaaaatagtagctctccactaatatcttatttgtagtatgttaaatttttctaaaacttctaaggatagttgctgtattgtatgatttgcatatggaggtatctataagaagttttatactttttagcaaaatagtcatttggtagccaacttaaacaaatgtttattaatatagaagttaataatatctactgatactcggccgggtgcggtggctcatgcctgtaatcccaccactttgggaggctgaggcgggcagatcatttgaggtcaggagttcaagaccagcctgaccaatatgatgaaaccctgtctctactaaattacaaatattagcagggtatggtggtgggcgcctgtaatcccagctactcaggaggctaaggcaggagaatcatttgaacccaggaggcagaggttgcaatgagctgagatcacgccactgcactccagcctgggcaacagagcaagattccctcaaaaaaataaatatctactgacacttaatacttggaaagggataaaaataaacattgtctaaagccgtggtccaaacacaacccctgccaacaattttagtccatttcttccaagacttttttttttctatgccttttgtgaaaactgtcaaaaactttttcaatgctgaattttagttctgagttaaaaatcatactacctgtttatatggtttcatatccacttttttcatgtgatatactctacaaaaagcctgctgagattttgattgggattatgttgaatctagatcaatttagggtgaaaaacttttgttagataaatcccttagtatttcacatttttaaatgctaaatggcatttttcaaaaattttcttttttcttttcttttttgagacagagtcttgctctgttgcccaggctggagtgcaatggcaaaatcttggttcactgcaacctccgcctcctgggttcaagcgattctcaaactgcctcagcctcccaagtagctgggattacaggcatgtgccaccatgcccggctaattttttaaactatttatagtagagagggggtttcaccatgttggccaggctggtcttgaactcctgacctcaggtgatctgcccaccttggcttcccaaagtgctgggattacaggtgtgagccactgcacctggcctcaaattttttttttttttttttttaagagacaggggtctcactcttgcctaggctggagtgcagtggcgtgatcataggtcactgaagctttgaactcctaggctcaagtagctaggaatacaagtgtgtaccactacacctggctaatttttttaaaaaaatttttttcgtagaaacgggagtcttgtgttaccaaggctaatctcaaactcatggcctcaagtgatactcttgcctcagcctcccagagtgctaggattgtaggcatgagttacttcacccagccaaaaaacttcaatttcctattgtttatttgctagtatatagaaatacatatagttttgtaccttgatgctgtatcttgcaaccttgttaaactcacttactagttctagtatattttttgtagattctatcagattttctatatatgtatcatgtcttctgagaataaagaaacttttacttcttgctgtgcaaactgaacaccttttctttctttctttctttttttaagacggagttttgctcttgtcacccaggctggagtgcagtggctggatctcggcttactgcaacctccacctcctgggttcaggcaattctcctgcctcagcctcctgagtagctgggattacaggcgctcgccaccacgcccggctaatttttttgtatttttagtagagatggggtttcaccatgtggccgagctggtcttgaactcctgacctcaggtaatctgcttgtctcggcctcccaaagtgctgggattacaggcgtgaattactgcgcccggctgccttttatttctttctcttgactgactgcactggctagagcctccaatacaatgttgaatagaagtggtaagaatgggccaggcatggtggctcatgcctctaatcctagcactttgggagagtatggtgggcaggttacttgaggccaggagtttgagatcagcctggcgaacatggtgaaactctgtctctattaaaaatacaaaatatagttgggtgtggcagttcacgtctgtaatcccagctacttgggtggctgaggcatgagaatcacttgaacccaggaggcggaggttgcagtgagccaagaatgcaccactgcactccagcctgggcaacacacacacacacgaaaaacgaagtggtaaggatggaaatccttctcttcttcctgatctaagggggaaaggggaaagttacaaaacattcagtatgctgttagccatataggtttttttgtagatgcccattatgaggttgaggaagttccctctgttccttatttgctacagattttatttaggattggatgttgaatttttttcaaatgctttttttgcatctactgagataatcatatgatttttcttttatagtttgttaatatagtgaattacattgattttcttatgttaaaccaatctttgcattcctgggatgaactctgcttggttataatatataatcctttttatttattatgggatttgatttgctaaaatttttattataattattttatctgtgctcatgattgttactagtttatagttttcttttagtctttggtttttgtatcagggtaatgctggcctcatagaatgagttggtaagtatcccctccttttccattttctgaaagagttttgtgtagaattgatgttaaaattattgcttaatgtttggcagaactcaacagtgaagccatctgggcttggagattttcttcatgggaaggtttttaactgcaaattctatttctttaatagtatagagctattcaggttatctgtttcttcttaggtaagctttggtattttgtttctttgaagaaatttgtcgcatttaatctaaatttttaaatttactgacataaagttatttataatatttcttattcttttattatctatggatctcttggtgacataacctctctcattcctaatattggtaatttcaggcttttctttttaacttggtcagtctggctagaggtttatcaattttattgatcttctcaaagaactaacttttggtttcatagatttttctattttctatttcattgatatctgctctgacttttaatctttcttatacctattttggtttaatttgtcttctgtttcacatttctttttttttttttttttttttttttgagacagagtcttgctctgtcgcccaggctggagtgcagtacagtggtgcgatcttggctcactgtaacctcagccttccaggttcaagcgattcctgtttctaagcctcccaagtagctgagattacaggcatgcaccaccagctaatttttgtatttttagtagagatggggtttcactgtgttggccaggctggtctcaaactcctgacctcaggtgatccacctgccttggcctcccagagtgctgggattacaggtgtgagccactgtggctggcctgtttcacatttcttaaggtagaagctgaggtcacggatttgagacctttcttcttttctaatacaggtgttaagtgctacaaatatcccttaagcactgcttcaacagcatcccacaaattttgatagtttgttttcattttcattcagttcaaaataccttctaatttcccttttgatttcgtctttgacctacaggttttttagaactgtgttatttagtttccaatctcttgaggatttttaaaacaatatgttattgatttctaatttatttccatctcagtcaaagaacatacttgcctttttttatacatttattgaaactttttttatggcccagaatatggtctgtgttggtaaatgttccatgtgtacttgaaaataatttgtattctgatctcattgagttgaatgttctaggtatatcaagttgatagtgatgcccaagtctcctgtatctttactgattttctgcctgttctgttattgagaaaggggtattgaaacttccaactataattatgatttgtctgttctctttgcagttctcttagtttttgccttcatatatatatacatatatatgtatatatatatatatttttttttttttgagatggagtcttgctctgttgcccaggctggagtgcagtggtgtgatcttggctcactgcaagctccgcctcccaggttcacgccattctcctgcctcagcctcccgaatagctgggactacaggcgcccaccaccacgcccagctaattttttgtatttttagtagagacagggtttcaccatgttagcaaggatggtctcgatctgacctcgtgatccgcccagcttagcctcccaaagtgctgggattacaggcatgagccactgcacccagcccatatattttaaagctctgttattgggtacataaacatttaggattgttatatccttttgataatggactcttctattatgaaaagataatatactgtgggtttataacatatgtaaaagtatgagtaacatattatcagaaggggagaaatggaagataacttaggcatcttatttttaagcatagttttccctttgtttctgcattagatgatttacctgaaatgtcattcaatttaacttactctccatcctcacccgcccagctttggttatgaggcagtagaaagaaatgatctgcctgtggttttctagaaatacgaaagttgagtccttaaggctacacagaaagaaagtacctccccagggcttcacccttcccatcctttcagcaggctttttgtctgtcgtatcttctctgttgaaatggccattgacaagaggaggaaaggggttttgttgtggattgttcaggcacttcctttggggtatatgggggatgagtgttacatttatggtttctcacctgccattctgatagtggattcttgggaattcaggcttcatttggatgctccgttaaagcttgctccttcatgttcttgcttcttcctaggagccagcaccgctctttgaccttgccatgcttgccttagatagtccagagagtggctggacagaggaagatggtcccaaagaaggacttgctgaatacattgttgagtttctgaagaagaaggctgagatgcttgcagactatttctctttggaaattgatgaggtgtgacagccattcttatacttctgttgtattcttcaaataaaatttccagccgggtgcggtggctcatggctgtaatcccagcactttgggaggctgaggtgggcagataacttggggtcaggagttcaaaaccagctggccaacatgatgaaaccccgtctctactaaaaaaatagaaaaattagccaggcgtggtggcgggtacctgtaatccaagctgctcaggaggctgaggcagaagaatcacttaaacccaagaggtagaagttgcagtgagccgagattgcaccactgcactctagcctaggcgacagcgagactgcgtctcaaaaaaaaaaaaaaagaacgttccaaggtcaggactaggcctcccctcagaagcagcaagtgacatatgtgacatcctctccactccctatttgcatttctaggttatataactgtactactatccatgcatgcctactcttgttcccagggtgaaggacccagacatggagagccgaatccctgcaggccattataaatgagattatgccatttgctcccatttcttcttattctttcatttttggggctctccatcttgatgtgttctttggatcgtgaacagatccaaagaaaaggttgttctgccgtgctgtttgtcaggatgaaaaactcttttttaagtgtttaggtctgcccccagtgcccagcccaatcaagtaacgtggtcacccagagtggcagataggagcacaaggcctgggaaagcactggagaaatgggatttgtttaaactatgacagcattatttcttgttcccttgtcctttttcctgcaagcaggaagggaacctgattggattaccccttctgattgacaactatgtgccccctttggagggactgcctatcttcattcttcgactagccactgaggtcagtgatcaagcagatactaagcatttcggtacatgcatgtgtgctggagggaaagggcaaatgaccaccctttgatctggaatgataaagatgataagggtgggatagctgaaggcctgctctcatccccactaatattcattcccagcaatattcagcagtcccatttacagttttaacgcctaaagtatcacatttcgttttttagctttaagtagtctgtgatctccgtttagaatgagaatgtttaaattcgtacctattttgaggtattgaatttctttggaccaggtgaattgggacgaagaaaaggaatgttttgaaagcctcagtaaagaatgcgctatgttctattccatccggaagcagtacatatctgaggagtcgaccctctcaggccagcaggtacagtggtgatgcacactggcaccccaggactaggacaggacctcatacaatctttaggagatgaaacttgcccatctctaaaatttcgggatttctttgtacccaacaaggttcaaacacaacagtcagcttttattcatgatttttacttccatctgctgatgtagaacatacctccagagtgacctcagaaattgtcaaatgtgaaaacacaagccatcacagtgagaaatgggaggttgagttagattgtctaaggctggagagtccatatactcccactgttagctctgaagtgtgtagccagtcttcagattctgggtcagttgcctcagtctctcttagcttttgccttactctttatccgaccactgccctgccaggaaaacaaggctctataactcctcttacaggtcagcttgacacaaaaagggtgcctggattcctaatgtttcattgtcacttttcccagtcagatgataatgcttttcaaatcaacatatattttgggggaggttggaagggagagttgaaatattctaagaatcaaagagtagcccactttaatcagagtatgacccctgattgctcacagtcatctcctgagcagtgtgagcgagtttcagatgaggaggctgaaggccagtcaggcatgctcgaggattccaagtctgtaggtgggagggcagagatttagtcctgttggccaaagcctctagggaatttctcactccagtggagaaggcaacacacttaccaaactgtgtggaaactatctcatttgattagaaattttacctcaagaagaggaaggacagttgagaaagaacattttcttacacatgagacagctaaggcttacaagaaggagaggaataatgaggcaaaataatcctcattaatattttcattcctcccctggggattagaactactttcagacccgattttaatggtaagttaggtacttcctacagttgccatccaaatatcagtcaggatcagacatgatgttagctcctgctacaataaaaccattttctccctgaatgaaaacaaaggttccacaggagacagtcccacagagcagtggcttcttttcctccctttaaaacctcatgttggctggacacagtggctcacacctgtaatcccagcattttaggaggctgaggtgggaagatggcttaagcccaggagtttgaggctgtagagctatgatcacaccactgcccttcagcctgggtgacagagcaagaccttgtctctaaataaacaaacaaacaaaaaatcctcttgtgttcaggcctgtgggatcccctgagaggctagcccacaagatccacttcaaaagccctagataacaccaagtctttccagacccagtgcacatcccatcagccaggacaccagtgtatgttgggatgcaaacagggaggcttatgacatctaatgtgttttccagagtgaagtgcctggctccattccaaactcctggaagtggactgtggaacacattgtctataaagccttgcgctcacacattctgcctcctaaacatttcacagaagatggaaatatcctgcagcttgctaacctgcctgatctatacaaagtctttgagaggtgttaaatatggttatttatgcactgtgggatgtgttcttctttctctgtattccgatacaaagtgttgtatcaaagtgtgatatacaaagtgtaccaacataagtgttggtagcacttaagacttatacttgccttctgatagtattcctttatacacagtggattgattataaataaatagatgtgtcttaacataa

SEQ ID NO: 33 - DNA, 38182 bp, Homo sapiens
  source 1..38182: mol_type = genomic DNA; note = HGNC Approved Gene Symbol: PMS2; note = Cytogenetic location: 7p22.1; note = Genomic coordinates (GRCh38): 7:5,970,925-6,009,106
tttagtggttcgaagcaacacaaatttattaccctacagtatgtaaattagtcccacagtgctggttccttccagaggctgagggagagaatgcgttttcttgccttttccagcttttccagaagcggtccccaacctttttggcaccagagaccggtttcgcggaacacaatttttccatggattggggtcggggagggatggtttcaggacgattcaagtgcattgcatttattgtgcactttatttctactattattacattgtaacatataattaaataattctacaactcaccatcacagagactcagtgggagccctgagcttgttttcctgcaactagacagccccatctgggggtgacgggagacagtgacagatcatcaggcatcagattctcataaggagcgtgcaacctacatccctcgtgtgtgcagttcacaatagggctcgtgctgctatgagaatctaatgcccaccgctgatgtgacaggaggcggagctcgggtggtaacgccagcgacggggagtggctataaatacagatgaagcttcgctggcttgccggcccctaacctgctgtgcaccccacttcctaataggccatggaccactactggtctgtgtccggagtgttggaatccctgttctagagactgcttgcaatccttgactagtggtacctccttccatctccaaaaccagcaagacagcctctctctggccagcagggaaaggtctccacctttgaaggactcacccaatggactgggcccacccagacaatccaggataatctctctgttgcaagatccttaactcagccaggcatgatggctcacacctgtaatcccagcactttgggaggccgaggcggtcggatcacctgaggtcaggagttcgagaccagcctggtcaacatggtgaaaccctgtctctactaaaaatacaaaaattagccagtatggttctggacacctgtaatcccagctactcgggaggctgaggtgggagaatcacttgaacctgggaggcagaggctgcagtgagctgagatcatgctattgaactccagcctgggcaacaagagcgaaacttcatctcaaagaaaaaaaaaaaaaagatccttcactcaatcacacctgccgagtcccttctgccacgtgaggcagcgtggtcacaggttctggggattaggacacagctgtcttgggggctgttatcctgccacagctcccaatctggagagttcataagtgggatcctgcagaccacgccagcacagtgccagacacgatggcacagtgactactgtactgcctcctccatctgagggattctaaagcaggaaggggagccgcccacagtctggagaaggggtgggggcagcagggggagccacatctgtcatctctgggcccccaagagggcatctttacttccattttcagccaagttcaaacaggacaaggttccatgaaaactatttgaaaagacagacagggattcttatattcccagaaccattcaaggccagtaactggaatgttctacagttcacatcctgaggaaaccaaatcacagcatcaaattatgggaaatcaaactctttttgttcccctgcgaggacagcattttgcgaccttggccgcacagaggaatgtttcaaatagtgacccctgtcccatccagtcattttcttccagccgggcagagaatcccccgtgtttaaaaatttaatgtgaatcagggctgagaatcactaactgaaaaggaccctacttttaaatttatgaaattaaacaaagatgaatttaattatcattaagggttgaaagttatagactaaactatgtccagccagagcagaggcctgagtaacttccaaagtggtttggtttttttttttttgttttgttttgttttgttttttgagacacagtcttgttctatctcacccaggctggagcgcagtggcgcaatctcggttcactgcaacctccgtctcccgggttcaagcgattctcctgcctcagcctcctgggtagcggggattacaggcatgcgccagcacacctggctaattttgtatttttagtagaggcagggtttctccatgttggtcaggctggtctcgaacttctgatctcaggtgatccgccggcctcggcctcccaaagtgctgcgatcacaggcatgagccaccatgcccagcccaagtgttcttatttttataaaatgtgttcttgcctggacacacacacacgagcgcatgcaaacatagagaaaaaaaatttgcaagcaatgctccatctggtttgaaaaggttctcaagatcacttttaaatgggtgtgatgtgtattttttttaagtagcaggttcattttaaaacaaaaaaggttagtgaagactctgtctttcaaaacataaaaatctgcgataaaaccaattattccatacagtgactacggtcagttctgagaaatgacacccaggttggcgatgtgtctcatggttggccttccatggggacagttccaggggtggtccatctcccccatgtgggtgatcagtttcttcatctcgcttgtgttaagagcagtcccaatcatcacctgagtgtgagacacaatggttcaacgttttagtagttttttgacgtcagaatggcagctcttcagaagcattcttctctaaaataaggctggacaagattacagctcaaaaactaccttccctgaaaaaccttcccccagagaagcctaggttctagatctcagccctccacccttctgtgaaatcaggctccttgtggctccttcaaggtggcaccgcctccactccagacgccgaccacacctgtctcagcagccaccctgccctctcaccctggcaggtgcagcagcctcccagcaggcctccctgccccactgcgacccctccgagccgctctccactcagcagccagtgattacttttaaagggctgtcaggttattcattccacttcacagctctccccctcacctgaataaaagcccccgtctgtcccctgacttggccctcgctgggctgtgcctgcacccccacctccaagcacgaatgcctcccttcctcaccccagctgcactgctactcccttcctcttgcacaggcccatcacgcaaacacctgccttgggactgtggcactcccgggaccctctcccccaatgggtgcaggcgtcactccccctctgtcgagctccgacctgctgcccatagcactccagccctggccctgctgcctccctgccatgggtcctctgacaggaaggagaggacacaagcctgaagcccaatgtcaccttctttcttcctgcagcaccctgagggctcgccatgtgccaagcacagtcagaaggctggggtgacagcaggttggagaaggacagacaatcaacaagtcaacagagaaccaagacaggtggcaccaggcgaggcggcctgctcaggtgtggggatggggtgaagggtgacggtggcaaacccaggtagagaggagagtagggagaaagggtgtaaggcagggaggagactgaggcgagcgtggaactggaaggcagctacatggctggaagctacatggtggggagatggggctggaagggtgggcagggctcaaagcaggagcctcctgggcaggcagtgacaacaccggagatggacgggtaggccagggcgagagggaaggagcagcctgtggttccccgggccactgagtcacactaaactcaggacatcaaaactgcccggctatgagctcagctccacgctctcactcacagactccaagactggaagatccatattatgtcttttattttggtgaggtcaggggtggtggagagactctgtctcccaggctggaatgcaatggtgcgatctcagctcactgcaactccgcctcccagattcaagcaattctcccgcttcagcctcccgagtagctgggattacaggcgcccaccaccatgcccagctaattttcgtacttttagtagggatggggtttcaccatgttggccaagctggtctcaaattcctgacctcaggtgatcaacccacctccgccttccaaagtgctgggattacaggtgtgagccaccacgcccagcccctattaggtctttatccaagaaacactgtggctagaagtcagactctgggccctcttctaattaaactctgcccttgagtcatttcatctaatctcatggctgtaaattacacctgaagctcacacagcaggctccatcccacccactccccacgtggcccccagctgctgctctcctcagcggccgcagccaccgcaccccttccagtctgttctctctccagcagctgcaatcacgggactccttcccgtctgttctctccagtggctcgtgccacacacagcacagacccccagggtctaggtatgaccggcaacactctacgtggctgtcctctggacgccgctctgctcactcccttcccctctccagggacacaatcagcctctggcttcagtcttgctacttccttcgcttggaaagttcttacccaagagggctccattctaccttttttttttttttttttgagacaaggtcttactctgtcacccaggctggagtgcagttgcgtgatgttggctcattgtaacctcgacctccctggctcaagtgatcctcccacctcagcctcctgagtagctgtgactacaggcacatgccaccacacctggctaatcttttaattttttgtacacatggggtctgcctgtgttgcccaggctggtctcttaactcctggcctcaagcaatcctcctgccttggcctcccaaaatgctgggattacacgtgtgagccaccatgcctggcttccatcccaccttttagatggcagctgagatgccacctgcccagatgccattccctgaccaccatctcacctggtcaccatgtttttctcttgtcatttcctgccccaaaacgctgttttaggccaggtgcggtggctcacgcctgtaatcccagcactttgggagaccaaggcgggcagatcatgaggtcaggagatcaacaccagcctgaccaacatggtgaaaccccatctctattaaaaatataaaaattagccaggtgtggtgggtgcctgtagtcccagctacttgggaggctgaggcaggagaatcgcttgaacctgggaggcggaggttgcagtgagctgagatcacatcactgcactccagcctagtaacagagcgagactccgtctcaaaaacagacaaagaaaaatgctgtttgaatctcttgactgtgcttactggcatctaatgcgtgtcatttatttgtggtgatgcctatttctccccactgtctgctccacaggggcaggggctgcagccgccttgttacctctgtgtcccgagcacctggagcagggcgggccccacatcaggggctcaaggagcacctgctgaataaataaaggaatggcgtcctggcccttcccagtggccagctgatacacagtcacttttcttggacatcaggctaatccccactgcaggcagaaccactgctgccaccttcccacaccaaccgaagcagcggcagtgacgccacgtgcaatgacaaccacggcaccccgtgaagcacctgctgcctcgatgactctgcagaatcgtgtccaatgtcgccgagtcctggcagcagcaaatctttatctcccaatgttgttatgacccataaggtccatagacgaacaaggtacctcaaacgctaactgcgttggagtcaaccaaagctcggagatagaatactggccgggccaggcacagtggctcatgcctgtaattccagcactttgggaggctgagacaaggggcaaaaggagaccatgtttctacaaaaaatttaaaaattagctgggcatggtggtgcatgcctgtggtcacaactacttgggagacagagagaggaggatcgcttcagcctggtacgtcaaggctgcagtgagctgtgattgtgccactgcactccagcctgggggacagagggagaatctgtctaaaaaaaaaaaaaagaagaattctgggttttttttgtttttttgagacggagtctcgctctgtcgcccaggttggagtgcagtggtatgaacttggctcactgcaagttccgccttctgggttcacgccattctcctgcctcagcctcccgagtagctgggactataggcgcccgacaccacgcccggctaatttttttgtatttttagtagagacgggctttcaccatgttagccaggatggtctcgatctcctgaactcgtgatccgcccgcctcagcttcccaaagtgctgggattagaggcttgagccaccatgcccggccaagaatactgcttaacagaggtaacaaaagagcaataattatgagttcaaggtcacagagaacgcagacgacacagatgctcagctacgacgctgcacgtagctctctgtgtaaaatgacccctggcaatcacaaaggcgtttacaaccttgaccaaatcaggagctgggctgagaccttcctcgactgcaagcttgagcagctgagctgacagccaggctttctttacttaccgacttccggcaggctctggaggcaaacatctgcttgactcgggaaggccggcacatgaccccagggctgtcgctcagcatgaagatcagttcatcgacgtcctggggtccgaaggtccagtttttactagttggcaaggaaatcagtttagccctttcagtgactggagctaaaagaatacaattttgagaaaaatccatgacttgacaaacacgtttcacttgaaagctacttaggatgaacatctgaggccgggcgtggtggctcacgcctgtaatccctgcactttgggaggctgaggccagcggatcatgaggtcaggagatacagaccatcctggctaacatggtgaaaccccgtctctactaaaaaatagaaaaaattagctgggtgtggtggcaggcacctgtagtcccagctactcgggaggctgaggcaggagaatggtgtgaacctgggaggcggagcttgcagtgagccgagatcggcaccactgcgctccagcctgggcgacagagcaagactccatctcagaaaaaaaaaaagtgaacacctgaaagagaggaaactcacaaaatgctttttggaggaactttttaatcttttataaaattaaaaaaaactggtctatatgacctgaaagattattcccagctctaaaaagacaagaatctatagttctgatttttttttttttttgagacagagtttcactcttgttgcccaggctggagtgcagtgacgtgatctcggctcactgcaacctccacctcccgggttcaagcgattctcccacctcagcctcctgagtagctgggattacaggcacccgccaccacgcccggctactttttgtattttcagtagagatggggtttcaccatgttagccaggctggtctcaaactcctgacctcaggcgatctgcccgccttggcctcccagagtgctgggattacagacgtgagccaccacacccagccgctatagttctaattaataacttaccattttcatcgataacaaaatcaaagccattctttctaaatatttccagattttctatcagaacagcttcattaacagcagttaagttgagagtctgaggtctgaaaaacacaaaaatgattcaaaccatatcctgaagtcaaacatttagctttacagcagaaatgaaatgaaaacaacaatactgtattttgaattcatgtcaaaataacaacacaaataacaacactactcagctaagtgtcacaaaacttcctgagaagttccttttaattttctctttcttaaagttctttttagaagttaaagtagctacaggccaggtgcggtggctcacgcctgtaatctcagcactttaggagcccgaggcaggcagatctcttgaggccaggagtttgagaccggcctggtcaacacagcgaaacactctctctactaaaaatataaaaattaggccaggcatggtggcgcacgcctgtagtcccagctacttgggaggcttaggcatgagattcgtttgaacccaggagggaggcagaggttgtagtgagagccaagatcacgccactgtactccagcctgggcgacacaacaagactctgtctcaaaaaaaaaaaaaaaaaaaaaacacccataaaaacaaaaattagctggaagtggtggctcatgcctgtaatcccagctactcgggaggctgaggcactagaattgcttgaacccaggaggtggaggttgcagtgagccaagatcacaccactgcactccagcctgggcaacagggcaagactctgtctcaaaaaaaaaaaaaaagttcaagtagctacaaaagtagtttgctttttcctcagcctgccacgccaatgactcccactttttctgaatcctttccttaaggataacagtatcacaaaaatgctatttttcctccttctaatacagaatttgaaacactgggttaggtcattgccagcatttgtaaacagaatgaacagacagcttttattttgctatcctgttccttcctctgcctgtattatatctccatccctctctcctcctggatttactgtttgtttttttttaacctttcgttatttttttcaaagatagagacagggtctcactatgttgcccaggctgctctcaaactcctgggctcaagcgatccttccacttcagcctcccaaagtgctgggattacgagtgtgagccactgcatctggtcctgagtgctggataagacaaacactgctcaaggcaggagacagctggtgagcaaacacaggcttggtcctggagccaacagattaccggggaagaaagacgttgagcaaatactcaggcaagtcgattatgatgagaaacgacaggaaggtcaggaagaaaaagcagccagtgtcatagagagacttcaccctggggtcaggaagtgacctttgagctgagtccggggataagagagttaatcaggtaacgggggagaagtgggtgcagggtgcaggacaagtattctagacagggacaacaatctgtgccaagccccaggatggaccgctgatgtttgcagagccacacataaagatatccttcattctgcttagtggccacatagggattcatcaggcctgccaagggaaaaagaaagacagccagagaggcttgagtacagggaacaaggggaagacgaacgggaaaagctacagaggtcaacagggccaccctacacaggggctggcagggcagggtggaactgggtctttatcctttaatcttgaagtgtggtccatctgggaccctaagtggtctgtgattacctgggccaacttgaaatgtcacagatgagaggttatctttgccgaatggctaaaaaatacaagacctcagccgggcatggtggctcacacctgtaatcccagcactttgggaggctgaggttggtggatcacctgaggtcaggagttcaagaccagcctgacaaacatggcaaaactccctatctattaaaaatccaaaaattagccaggtgtggtggcgggtgcctgtaatcccagctactcgggaggctgaggcaggagaatcacttgaacccgagaggcagaggttgcagtaagccgagatcacatcactgcactccagtatgggcgaaagagtgaaactctgtctcaaaaacacaaaaacaaaaaacctctattaagaggaacagggaagggatataaagtagcttactaaatgtctattattaccattgcctcctactgagaataaaaacaattcacgcattccacaggagagtactcagcaaactacacaggagagtactcagcaaactacacaggagagtactcagtaaactacacaggagagtactcagcaaactacacaggttcagtggtacatttctccatgtgggatctacttgttgggatctgagtttacttcactacgtggtttaatttcccacacgaaaatccatgacctcttcttctaactttgctgaagacaagactttggttttacatgatactatcacacctgacctttgtgaagtagtcagggtaaaacattccagtttggccgaggagagagaaataccaaattctgcagtgactatcttaaaataatttttaaattttattttattttatttattaatttatttgtgagacagagtctcactgtctcactctgtcacccaggctggagagctgtgcagtggcacgatcatggcagcctcaatctcctgggctcaaacgatcctcccacctcagcctcccgaatagctgggaccacaggcacacaccatcaagtctgactaattttttacatttgttgtagagacaaggtttcaccatgatgcccaggctggtctcaaactcctaagctcgagggatctgcctgcctcagcctcccaaagctctgggattacaggcgtgtgcccctgcatccaacctgcagtgactatctgacttctgattactctactgtcaatcaacactggcgcacaggctgtctgtctttctgaacacacacattccatacactatgcatactaatactccatactatcaattgccctcatcagaaggatcttctggctaaccagtgatcaacatttttaatagcgaaaaatacctgatacttagagaacatgttaaccacgtgaactggggcaggttactcaacctctctgcatgtgcctcagttttatcgcttgtggaatggtgatggtaacagtaacaaccccataggtttttgaggattaaaggaactaatacacatacattatttcaacagtgcctggcagattctaggcactgaataaatggtaactatcactattatgtaaaaagtataaaaatctgctatatgaatacttatggaaaaatacatatatacatatagacacacatataaactattaggtctctttttttttttgagatagaatctcgctctgtcacccaggctggagtgcagtggtgcgatctcggctcactgcaacctctgtctcccaggttcaagcgattctcctacctcagtctcctgagtagctggaattacaggcgtgcactgccatgcccagctaattttttgtatttttattttttatcattattattattttttgagacggagtttcactcttgttgcccaggctggagtgcgatggcacgaactcggctcgctgcaaactccgcctcccgggttcaagcgattctcctgcctcagcctcccaagtagctgggactacaggcgcccgccaccacgcctggctaattttgtatttttagtagagacaggtctcaccatgttggtcaggctggtctcgaactcccgacctgaagtgatctgcccacctcggcctcccaaagtgccgggattataggcgtgagccaccgtgcctggcctttttgtatttttagtagaggcggggtttcaccacgttggccaggctggtctccaactcctgacctcaggtgatctgcctgcctcggcctcccaaagtgctgggattacaggtgtgaggcaccgcgcctggccaactagatattttttattttttacacccctccttcctagatctcttcttttttaaagtagatacaaggtcttgctgtgttgtccgggctggtctcaaactcctggcctcttgtgatcctcctgccttggcctctattagatcttcaatttgagggggagtctgggaatgaacactaaacacactcacgctatgagcctctgcccctggagcacggtgtgctgctgcagcatctcgaagttatacttctcgtccgtggcatgctggtccactatgaagatatcctcattcagtttggttattataaatcccaggttaaactgaccaatgatttccatttctgcaaacatcgttttactgcaggtagaaaatgttaattatcagacattttacaagattatttttctgattatgttatagaacactgtaataaaaaaaaagtcaaacaatacaaaaacaaaataaagtccctagccatcccgctttctttttttttgaaacagagtctcgttctgtcacccaggctacagtgcaatggcacaatcttggctcactgcaacctccacctcccgggttcgagtgattcttctgcctcagcctcctgagtagctgggattacaggtgcgccaccatgcccagctaatttttgtatttttagtagagacagagttccaccatgttggtcaggctggtctcgaactcctgacctcatgatctgcccgccttggcctcccaaagtgctgggattacaggcgtgagccactgcgttcggcttaaccatcccactttctaaagataacattaattattcattcatccaactctccggagaagacatcagttgctactattaacgatttaaatggaatatatccttctagacccttgtctccatatataattttttttaattttaaaaaacaaaaatggaatcttaattctccattctgtcatcacttaatgcatctgaaacaagttttcagacctgtacacatagatctacttcattattttttctttttttttttcttttaagacggagtctcactctctgttgcccaggctggactgcagtggcgtgaccgtggctcactgcaacctgcgcctcccaggttcgagcgattctcctgcctcagcctcccgagtagctgggactacaggcatgcaccgccaagcccggctaatttttttatttttagtagagacaaggtttcaccatgttggctaggctggtcttgaactcccgacctcaagtgatccacctgcctcggcctcccaaagtgctgggattacaggcgtgagccaccgcacctggcctacttcattctttttaatggccacataggaattcattgcatggatgtaccataatttgtctgacaaatcccctactaaaggacatttcagttgtttccaatttcaatagcgcactcaaagctgcaacaaatacttctgtgcataaacctactcatctgtgggtgcatttccgtgagacagacgctagagggagaactacatatgtacttcttgacgggaaatctgtgaaaagtcacactcccaccaatggtgtgtaagagcacctttctgccaatgctggatatcaatccttctcatctttgccaggcccaccactgggtcctttgcgggtggcttcaacatctaatgtcattaaatactaacttagtcaatctggacaaaagacagacaccaccgctaaccttcacacgagaaattgacactgtcattctcagtcccacacaattaaatccggtgaaaatggattttccgcagtatcagcgcggtgatgacaagaaatggctctgttaaagcagccatggacgttttctggttctcacctggtggcctgagctgaggatgaaagcagctgtaatgtaatcccagcactttgggaagacaaggtgggcagatcatttgaggttgggagttcaagaccagcctggccaacatggtgaaaccccatctctactaaaaataaaaaaattagccaggcatggtggtggacacctgtactcccagctacttgggaaacgaaggcagaagaatcgtttgaacccgggaggcagagcttgcagtgagctgagatcgtgccagtgcactccagcctgggcgaaagagtgagactcttgtctcaaaaaaaaaacaaaggagctgatattgttgtttctttctataagtgctccaggaagacccggtcccatgccaccatgctcgtcaccatcacaatcaaccacaggggacagtttggtgaactgtgagacctccacatggcatggattactgagcccacatttcctatggtgaggggctccacacagagctcaaatccaagtcataaccaaaccagtccccaaatcctatctttgagggtctgtttcctggtaccaattccagatcaggcagagtgcaatcaatcaagagacaaaaaccacaccagtgattttaacagggacttttttttttaagacagggtcttgctctgtcacccaggctggagtgcaatggcatgatcatagctcactgcagcctcaaactcctgggctcaagtgagcctcctgcctcagccccctgagtacctgggactacaggcgtacagcaatgtacttagctaattttttttttttttttttttttttagagatggggcctcattatattgcccaggctggtctcaaactcctagcctcaagtgattctcctgcctcagcctcccaaagtgctggaattacaaggtgtgcaccaccatgttaggcctgaggaggaaaaatgtataataaggcattacacaaactagtaaaaggtggttaactactatgctaagaaatacaggaatggaaaatgctactatcctagggaagagggagagtcctcagaaaaggaactctttttttcttttttctttttcttttttttttttttgagatggagttcgctcttgttgcccaggctggagtgcaatggtgcaatctcggctcaccacaacctccacctcccgggttcaagcaattctcctgcctcagcctcccaagtagctgggattacaggcatgcaccaccatatcccactaattttgcatttttagtagagaaaaggtttctccatgttggtcagcctggtctcgaactcccaacctcaggtgatccacccacctcagcctcccaaagtgctgggattacaggcatgagccaccatgcccagcagaaaaggaactcttgtaagaggctcctacccactcaggctgagtttcagacctccttggagcaggagtggccgcagcctgctggatggagagaagctgccagagtgagtgatgacacaggaactcctgccgcacaggagggaaggaaaagaacatcccagaagcatcccagatgccagcacaaataccacctcccctggcgccgatcccaggctctcccaggaattgtctgaatatgccctggttcccagtacatagataatctgctcaaaagctggtgctggcctaaaagacccaagtcttccatgtgtttggagtctgtgtcctgccacagagaacaggatctggccaggcgcagatgccggaattacaactgcgcactaccgcgcccagccaattttattgtagagacgaggtctccctatgttgtccaggctggtcttgaactcctgggctcaagtgatcctccctccttggcttggcctcccaaagtactgggattacaggtgtgagccaccacacctagcctcaaaatactcttaagaaaaaactttacctggccgggtgtggtggctcacacctgtaatcccagcactttgggaggccaaggtggctggatcacctgaagtcaggagttcgagaccagcccagccaacatggtgaaaccctgtttccaccaaaaatataaaaattagccaggcatggtggcgtgcacctgtaatcccagctactcaggaggctgaggcaggagaaacgcttgaacccgggaggtggaggctgcagtgagccaagatcatgccactgcattccagcctgcgcaacagagcaagactctgtctcaaaaaaataaaaaataaaaataaaaattttagataaaaagagaaaaagtaaaaaattaaaactttaccttatctcttttcttagttcatcttcggctgcttgattttctccaggacaaatctttgccctaaacttcctgtaattctgttccccttcactttgctgtgcttcatgatgtaactgctttattcgtttagctaaagaactcatagaaaagtccaggggcacaactttcttattaattttcacagctacatcaacctgagaggctgacatgtcctgagtatttactaacttttgacaaatgtcagaactggaaagaatttcttcttttttaaaacgctttgtgtttggggttgcgagattagttggctgaggcaaaactcgaaatttacatccggtatcttcctggtttgaatggcagtccacatctgaaaaagagtcgtcagttttaggcgctttctcctgagagtccacatgttcctgcgagcccctgtcccctggggagctggccgcatactcgctgctgcagtgactgcccgtgtctgggatgctgaacccctcagaatccacggaagtgctgccgtgccccgagtccttctccacctccgctctgtccgtagggtcactgggtccgtgactggaactcactgcctctttctgaggtctcaggacgcctttgtcagagatggcacctgaagtgctagaagacagcataccccttttctgtcctagagggctccttcttggttctggagtctttgggctgtgaggcttgttctctgttgtgtgacgaagagaaaaggcctctcgcagtctggaaatggacacgtcttttttttcttctccagtccttaatgaaggggattgatcctgcttttctaccatgggcttttccaaatccgctgcatgcatttttattaagttacctaagcaaacgtggacggagaagagggtcagggactatcctgaaatggtgagaggacgtgcttatgtgaacagatacttcacaaaagaggagatccacatgctaattacacagatgaacacagttcaatgttcaaaataaaactataatatgggccaggtgtggtggcttacgcctgttatcccagcactttaggaggccaaggcagggggatcacatgaggctaggagttcaggactggtctggacaacatggtaaaaccctgtttctactaaaaatacaaaaattagccgggtgtggtggcatatctgtcatcccagctacttgggaggctgaggcacgagaatccctttagcccgggaggcagaggttgcagtgagccaagatgccaccactgctctccagcctgggtgacagagcaacactctgtctcaaaaaaaaaaaaaaaaaaaaaaaaaaccacaacacaatgcaatatggccatatactcaccagaatggtaaaattaaaaaaacaacaaatgctcacaaagatcaggatcaagaggaatgcctgaatacctctggtaggaatgaacctggtacagctgctttgaaaagttctctgggaatacctcctaaatctgaatgtatgcacacctgcaacccagcatagctactcctatcagaagtgcctattggccggcacagtggctcacgcctgtaatcctagccctttgaggtcaggagttcaagaccagcctgaccaacatggtgaaacctcatctctactaaaaatacaaaaaaaaaattagcagggcatagtggaatgcacttataatcccagctactagggagaatgagaatgaggcaggagaatcacttgaacctggaaggcagggttgcagcgagccaagatcactccactgcactccagcctgggcgacagagtgagactccctctcaaaaaaaagaaagaagtgcctatctatgctcgtcaaaaagacgtggatgaggatgttcatgacagcattcttcattatagccccaaactggaaacaattcaaatattcacaaatgatgatatctgactataatggaacactgtatagcgaacgaataaatgaattttgccacatgacttgggtgaatctcacaaacaaaataatgagagaaagaaacaaatcacagaaaaggacagactgaataacttcaaattaaaaacagattaaactataccgttttgggttttttttgtttgtttgtctgtttttttgagacggagtctcgctttgtcacccaggctggagtgcagtggcacaatcttggctcactgcaagcccctcctcccgggttcacgccattctcctgagtcagcctcctgagtagctgggactacaggcgcccgccaccacgcccggctaattttttgtatttttagtagagacagagtttcaccgtgttagatagtctcgatctcctgacctcgtgagccgcccgccttggcctcccaaagtactgggattacaagcatgagccgctgcgcctggcctaaattctactgttagaagtcaggaaatcccagcattttcagaggccaaggctagaggactgcttgagctcaagagtttgagaccagcctgggcatcatggagaaaccccatctctaatgacaatacaaacattagccaggtgtggtggtgggcgcctgtaatcccagctactcaggaggctgaggcaggagaatctcttgaacgtgggaggcttcaaggttgcagtgagctgagatcgcatcattgcactccagcctgggtgacaagagcgaaactccatctcaaaaaaacagacatgacaagggagttaaaaatgcagtcactgcagacttcttctaatcatatatcttatatgacttcatccgtttacagtttacaaaaaactagaggtacttggaggcagctacttgggaggctgaggcaggaagatggcctgagcccaggagtgtgatgctgcagtgagctacaatggcaccactgcagtccagcctgggtgacagagcaagtccctgtctcaaaaaagaattaaaaatgataaaataatataagagactttgttttcatgtcaaaaaaaagtttacttggaaaaaataaggaaacacattagctaaaagctttagaagctgtttgtacactgtatttttcttaccttcaacatccagcagtggctgctgactgacatttagcttgttgacatcactatcaaacattcctatcaaagaggtctttaaaactgccaacaaaagcttttcctcttgtagcaaaatttgccttttatctggagtaacattgatatcaacgcattctaaggcaaaaaagaaaacatatttattatgtttaaattcacttttattttatttattaattattattttcagacagcgtctcactctgtcgcctaggctggagtgcagtggcgcgatctcagctcactgcaacctccgcctcctgggttcaagtgattctccctgcctcagcctccgaagtagctaggattacaggcaagtgccaccacactggctaatttttgtatttttagtagagatggggtttcaccgtgttggccaggctggtctcgaactcacaacctcaagtgatccacccgccttggcctcccaaagttctgggattacaggcgtgagccaccgcgcccagccaaattcacttttaacaatagaaatttccccatctattatttcattcacttgtatttatcacaagtgctattaaaaacattacagtgtccaggttaagattcataagttatgaaatcagctttttcaaataaatgagcaaaagacaatttttgaatagacaaaatacggaagggcttaattaggtaaattgttaaaggaaaagcaaataaacacataaaaataattttaaatatgcaaactaaaataagatattttaatcccctactgaatttagcttaacaattataatacctagtacattataggtaggtgtgtaaattggtacatctagaacacaatacagaaaaagccttaaaatgatcatattcactgacccagtaattctactcccggcaatttatattcagaataattaaagatgtaggctgagtgcagtggctcacaccctgtaatcccagcactttgggaggctgagacgaacagataagttaaggtcaggagttcaagaccagcctggccaacatggcgaaaccccgtctctactaaaaacacaaaaaattagtcaggcatggtggcaggtgcctgtaatccgtgctactcaggaggctgaggcgggagaatcgcttgaactcaggaatcggaggttacagtgagctgatattacaccactgcactccagcttgggagacagagcaagactctgtctcaaaaaatatctaataataaagatgcagataatgatttaattataaggaaagtatttataatttccaaaaactaaaaacaatttaattttgaaaaatttaaaaattaaaataccaaactataaccatgcattggaatataattcacctattaaaaccacatttctgatcaatttctaataacatggaaaagaaaacattcacatctaaggataaagagcagtatacaaaattattttctcatcccaaagaatatgggagtaggggagagagagagaaagagagagaggacagaagatattttttaaggtatgtacatatgtgtttctaagtatctagaaaaaatactcaattacaataaaccaaaattttaacaatcagaaaaaaaaatctatatgaaatgaattatttatgaaattaggaagaacatttcatctactttctcccttggttgacattaaaaaaaattacattttcctaacaatataattaacatagtctcaagtagaaagcgggaactctgtttaaaaaaaaaaaaaattatagggccaggcacggtggctcatgcctgtaatcccagcactttgggaggccaagacgggcagatcacgaggtcaggagatcgagaccatcctggctaacacggtgaaaccctgtctctactaaaaatacaaaaaattagccaggtgtggtggcacgcacctgtagtcccagctacttgggaggctgagtcaggagaatcgcttgaacccgggaggcagaggttgcagtgagccgagatcacgccaccacactccagcctgggtgacagagcaagaccccgtctcaaaaaaaaacaaaaacaaaaaacttacatgaccataaattgttatctcattccagtcatagcagagctgtagaatttcattttattctttgaggcattagtcactagttgtactgaaatgccaatggaacttacctgaatcaacagaaatgttaagaacaacaaatggatactggtgtcgattatacatgtggtagacctcattcacgagtctgcagacctgcacaaaatacaaggagtagaaaagaataaatgacaaatgttcccagccccccgcattctaacaacattctattctaaccaaccagcatgttcttagaaggggatacttttttgttttttttttttttgagtcaaggtctcgccttgtcacagcctggagtgcagtggagcaatcatggctcactgcagcctcaacctcccaggctcaagtgatcctcctgtgtcagcctgacatgtaacttggattacaggcaggatttttttttctttttttttttcaacggagtctcgctcttgttacccagactggagtgtaatggcacgatcttggctcactgcaacctctgcctccggggctcaagtgattatcctgactcagcctccagagtagctgggattacaggcacacgccaccatgaccagataatttttgtgtttttagtagagatggggtttcaccatgttggccaggctggtctcgaactcctgacctcagttgatccgcccgcctcaacctcccaaagtgctgggattataggcgtaagccactacacctggcctaaggatacatttttttaacagctttactgagatatgactaacatggaataaactacacatatttaaagtgtgcaatttcataagttttgacatatacacaaacacctgtgaaactatccccacaatcaagataatgaatatatccatcaccaaaagtttcctcacaatctcaaagtgatatttctctaatcatagattcctaaaactgaatatttttccaacttaaagttgctctatgagaaattctagtgaaatgcaagtgcagcttaaatgttcataaaacatattcaatgtacatagaaaagtatctatgacattaaaatgtcattagaaataaaccaaaatatcacattattaatagttataattaataattatgaatccatcacactataggttaaaaaatttagaagttcaaccacatctggcagattacaagcaaactctaaagcatcattgaaaaacaggggctgggagcggtggctcacgcctgtaatcccagcactttgggaggtcaaggcaggtggattgcctgagctcaggagttcttgactagcctgggcaacacagtgaaaccccatctctactcaaatacaaaaaattagccaggcatggcagcatgtgcctataatcccagctacttgagaggctgaggcaggagaattgcttgaacctgggagggagagcttgcagtgagccaagatcacgtcactgcactctagcctgggcgacagagctagactccgtctcaaaaaaaaaaaaaaaaaaaagaaagaaagaaaaaaaaacaaaatattactgaggtacaatgtgttgctaagatacaaactcaaaaaacccatgtcatcatatcaagatgatcaatttaaatctgaggcagaagtaatctgagcccttattttcctaggaaaatagaaagaagagaaaatatagaaatctatagaaaatatagaaaccatgggccgggcgcggtggctcatgcctgtaatcccagcactttgggagacagaggcgggtggatcacgaggtcaggagttcgagaccagcctggccaatgtggtgaaaccccgtatctactaaaaatacaaaaattagccgggtgtggtgatgcgtgcctgtagtcctagctactagagaggctggggcaggagaatggcgtgaacctgggaggcggtgcttgcagtgagcagagatcatgccactgcactccagcctgggggtgacagagcgagactctgtctcaaaaaaaaaaaaaaaaaaaaaaaaaggaaatatagaaaccatgtaatcagtctatactgaaaggtgacatagaatgttataaaatgtttagtttcttcaaatagttttagtttttacaataataaatatactggtaatatgtgtttatatatttatgtatctatacacacaacacatataatgtatatatgcagatacaaacacactcacgtatatgcaatttaaaaaactatacagaggccaggcgcggtggttcacgcctgtaatcccagcacttcgggaggccaaggcaggcagatcacgaggtcaggatttcaagaccatcctggccacatggtgaaattccgtctctactaaagacacaaaaacttagccgggcgtggtggcgcgcgcctgtaatcccagctacttgggaggctgaggcaggagaatcgcttgaactcgggaggtggaggttgcagtgagccaaaatcgcaccattgcactccagactggccaacagggcgagactccatctcaaaaaaaaacccaaaaaacaacaacaaaaaaaactgtacacagatagatgcgctccttaacttatgatagggttatgtcctgataaacccataagttaaaaatattgtatctgctgggcgcggtggctcacacctgtaattccagcactttgggaggccgaggtgggcggatcacgaggtcaggagatcaaaaccatcctggctaacaaggtgaaaccccgtctctactaaaaatacaaaaaaaaattaaccaggcgtggtggcaggcacctgtagtcccagctactcgggaggctgaggcaggagaatggcgtgaacctgggaggcggagcttgcagtgagccgagaccacgccactgcactccagcctgggtgacaaacaagactccgtctcagaaaaaaaaaaagaaagaaaagaaaatactgtatgtcaaaaatgcctttgtgataacctaacctactgaatgtcccatctcagccttgcctcagaatacttacatagtctataggcaaaataacctattttataataaaatgttgaatatcttctgtaatttattgaatactataccgaaaaacaatggttcaataggtacttgaagtatggtatctactgcaaaaaataacttctgcaacaaggtaaagtagtagaaaaaaatatatatatatttttttgaaacacagtctcgctctgtcacccaggctggagtgcagtggcataatctcggcttactgcaagctccatctcccaggttcaagtgatcctcctgcctcagcctcccatgtagctgggattacaggcgtggaacaccatgcctggttattttttgtattttagtagagacggggttttgtcatgttggccaggctggtctcgaactcctggcctcaggcaatccacccgcctcggcctcccaaagtgctgggattacaggcatgagccactgcgcccggacagaaaagtcttcagttgaaacatctgaagctgggggccatctgcggtagacttctgtaaatgcacaaaataagataatgttaaagccatgtttctcaaagtcccgagctccacgtaaactgcctattatcagaaaaaagttatcaattaaaagtcaaaggcataaagaacaaactaacacaaaaaaattttaaatacctttgctgggtcacaaggccgccggttgataaagaaaaactgtctgtctgttgaactccttccaactccatgcgtgcattgtgaaatgaaacctgagatgctattcaacattaatatggtaagggcaggattccagagtgaaagggattagaaatacgatcacatggcacattcttaaagtgaaatgaaaacaaaacaccaggtgacatgctgataaggatcactattgcagttcacgggtatctgtgctccaaatcttgatgagtcatcaaagaaccaaaccttctggaatattctaaagctcctacagtcaaccaatgcaccacaggtgatgcagtgcgtccaaaactgatgtgttgcagctctccttacccttcctgataaatcctcagcctctgtaagtgggtctcgcttcaaatgcattctcagaacctccgtgctgccacccctggtttgtcaatgaagtctaaccacttgtgctcagaattttgcccacattccctcccctttcaaaacctcccgggtaggacgcttatatctcatgtcttggtaaagcgcttgcttcacatgagacccaccccagggataccggcatttccagaagaacaccaccttcacataaagacataaagctccatgtttaccatttcaggcataagccaaaagcaagtggaggaagagtaagaaatatagatctcaaggcaacaaacaaacaaacaaaaagaaatacagatcttaggctgggtgtggtggctcatgcctgtaattccagagccttgagaggccaaggtgggtggatcacctgaggtcaggagttcaagaccagcctgggcaacatggcgaaaccccgtctccactaaaaatacaaaaaatcagccgggcatggtggtgaacacctgtagtcccagcttctcggaaggctgaggcaggagtatcgcttgaacctgggaggcagaggttgcagggaggcagaggttgcagtgagccaagatcacggcactgcactgcagcctaggcaacaaagcaagactccatctcaaagctaaaaaaaaaaaaaatatatatatatatatatatatacacacagatagatagatatctttacaggaccaatcctatttatggaagtgtctattttcttatacgaaaagtaatgacactgaactgccttcatcagatgccaggaaagtcaaaatcatttaaaatgataaaataatttacaagttagtctaactaaacagagccttaaagaagacctgctcaacagaaaaccacctgaaatataccacttactcaaaacatggtttgaattaagcaactgactcctttgtataaatcatctttcttagccacagcattgctcacagttttataaaggacataaaaaactattatccctagccaggcgtggtggctcatgcctgtaatcccagcactttgggacaccaaggtgggcggatcatctgaggtcaggagttcgagaccagcctggccaacatggtgaaaccccgtctctactaaaaatacaaaattagccgggtgtggtggcacgtgcctgtaatcccagctactcaggaggctgaggcaggagaattgcttgaactcaggaggtagaggttgcagtgagccaagatagcaccattgcactccagcctgggcaacaaagcaagactccgtctcaagaaaaaaaaaaaaagacacgaaactattagccttagaatcactatctttaaaaaaaaagctctcaggataaaatgttcaattgtagttctcttgccagcaatctacttactaaaaaagattatgcagagcatcggaacagctcaaaccgtactcttcacacacggagtcactagggggcagctgaacaaaaggaatgaggctttgcaactgaaaaaaaaaaaaaaaaattcacagttacttcctaataaagacagagtggacttaatctgttttctttcttagtcaagctattgacattacaagcgcaaaaaaaattaaaagaatcttttgttttgttttgttttttgagacagggtctccctctattgcccaggctggagtacaatggctcaatcatacctcactgcaatgtcaaactcgtgggttcaagcaatcctcctgcgtcagcctgtcgagtgagtagctgggactacaggtgcacaccaccacacctggctaattttttaatttttttgtagagatgggatcttgccgtgttatccaagctggtcttaaattcctgggctcaagcgattctcccacctcaaaattgttggccgggtggttcaaacacataatcccaacagtttcctctcccagagtgctgggattacatgtgtgagccgtgggaacaacaattttgattttatgatataagaaagatgaaacaagtacctacttattcagaacccacacattgcccacaataacttatatttttttcagagagagagtgaaaagacgcagtatacgagtgtctctggaagaataaaatgaaacacattcagctctcaaacatcaatttttgtgataggtactttgtttttttttttttttttttcctgggatggtgtcttgctctctcgcccaggctgcagtgcagtggtgcaatctcagctcactgcaacctccatctcccgggttccagcgactctcctgcctcagcctcctgagtagctgggattacaggtgcctgccaccacgaacagataatttttgtatttttagtagagatggggtttcaccatattgatcaggctggtctcaaactcctgacctcgtgatccgcccacctcagcctcccaaagtgctgggattacagacgtgagccactgcgccgggccttgtgataggcactttaaaaatcaattcttaatctgggcgcagtggctcacgtctgtaatcccagcactttgggaggccgaggcaggcggatcactagaggtcaggagttcgaggccagtctggccaacaagatgaaaccccatctctactaaaaatacaaaaaattagctgggcctggtggcatgtgcctgtaatcccagctactcaggaggctaaggtaggagaattgcttcaacgcgggaggcagaggttgcagtgagccaagatggcgccactgcactccaacctgggcaacagagcaagactccagctcaaaaaaaaaaaaaaccggccgggcttggtggctcacacctgtaatcccagcactttgggaggccgaggctggtggatcacgaggtcaggaattcgagaccagcctggccaacacggtgaaaccccgtctctactaaagatacaaaaaattagcctggcgtagtggagcatgcttgtaatcccactactcgggaggctgaggcaggagaattgcttgaatctgggaggcggaggttgcagtgagccaagacaacaccactgcactccagcctgggcagcagtgcgagactccctctcaaaaaaaaaaaaaaaatcaattctaagattttattctccattctactggaagggacaatggaaacccgctataatcactagagcaataagaggcgttgaagtaaccggccatcactacctgcttctgcccaaacacagagccgatattttcctttatgctggggcttccacctgtgcataccacaggctgtcgttttccttgtccaagctgattggtgcaacttacacggatgcctgctgaaatgatacagtatgcatgtaagacctggaccattttggcatactcctgtttaaaaaacacaaacacaatattctacattactttaatattataggaattacacagctcaagttacaacatccaacgcaaggttctcacatcatcgcacaaatcaagggaagcactgttgacagaatgatctgtaaagaggtgtcttcctatattctacagaaaggaacgcagagcttttggctcctggtcacagtcctctcacttcccaatgtgccatgcatcctggtaaaacaactaaaaagtacagcctgtaatcccagctactcaggaggctgagggcaggaggatcacttgagaccaggagttcaagaccagcctgggcaacacagcaagaccctgtctctacaaaaaatttaaaaaaaaaattagccgggcgtcatggcatgtgcctgtagtcacagctactgaggaggctgaggtgggaggatcgcttgagcctaggagttcaaggctgcagtgagccatgattgcaccactgcactccagcctcggtgacagagtgaggccctatctctaaaaatgaaaattaaaaaactgaaacgtacattgtgtttgattttataatctctccttttgaaatgtatcttcgtataatagaaacactggcacaagcattttggtatgcaaagagatacacaaaaatgttcactgaaacaatctctatgaacaaacagaaacaacctaagcaagcatcattgaggagttgattaattatggtatagccatagcgcagcagaatgacaacaaataaggcagtgtgcaccgactaaaaaagacaatcacaatatgctaagtaaaaagtcagttatagggccaggcatgatggttcacacctgtaatcccagcactttgggaggctgaggcgggaggatcacttgagcccacgagttcgagacctgcctgggcaacacagaaggacccatctctacaaaaaaaacaaaaattagccgggcatggtagcacgggcctggagtcccagctacttgggaggctgaagtgggaagattcattgagcctgggagatcatggctgcggtaagctgagattgtgccactacatcccagcctaggtgagagagcaagaccctgtctcaattaaaaaaaaaaaaaaaaaaaaaatacaactttcaaccacatacaattctgtattacttgcatgttgtacattctatattacttgctttcattatattaacttatgaatttatcttgaaaattattccaacagttataaacacatgaaattaaaagcagcctgaaaagatatacaaactgtaaataacagttatctctgacaaatagaagttctacattcctgtattctgctaaggcactaatttttttaccataagatacaaaaaaagagtaagttttctctactttagaaaatttaaatttgtgaaaaaatgtaataaagttaaaattagcagccaagtgcagtggctcacacctgtaatcccagcactttgggaggctgaggcaggtggatcacttgaggtcaggggtgcaagaccaggctagccaacatggtgaaactccatctctactaaaaatacaaaaattagctgggcgtggtggcgcacacctataatcccagctactcgagaggctgaggcaggagaatcacttgaacccaggaggtggaggttgcagtgagccgagatcgcaccactgcactccagcctgggcgacagagtgagaagactccatctaaaaaaaaagaaagttaaaattagcaccaaatgctttacaagtaaaaaaagtttttagctgcatatgtttaagtaactttttagattatgaaaaacacacatacaaaatgggaaggcacaaagaagacagcaaaaactgcatgagatctcacatccaaggataactgctgagaacatgaaagtgccgagtcttccagcctttatactatacacatttaggcttgttgttttgttttcacaaaattgtaatcaaataatacagacagttctataatctgctttttaaacacaacgactatataacatttagctattttcatttgcattcaaattcataagggttctaatagctcatttctcagaaaaccaagagaaatattcttttttttttttttttgagatggggtctggctctgtgcccaggctggagtgcaatagcttgatctcggctcaccgcaacctctgcctcccggattccagcgattctcctgcctcagcctcccaaggagctgggactacaggcacatgccaccatgcccagctaatttttgtatttttagtagagatggggtttcaccagtttggccaggatggctttgatctcttgacctcgtgatccacccgcctcagcctcccaaagtgctgggattacaggtgtgagccactgtgcctggccgagaaatattcttattaaaatataagtacataaggccaggcatggtggctcaggcctgtaatcccagcactttgagaggccaaggtgggcagatcacctgaggtcaggaattcgagaccagcctggccagcctggacaacatggtgaaaccccgtctctactaaaaatacaaaaattagccagctgtggtggtacacgcctgtaattgcagctactcagaaggctgaggcaggagaatcgcttgaactcaggaggtggaggttgcagtgaaccaagatcgcgccaccgcactccagccagggcgccaaagagaaactccatctcaaaaaaagataaaaataaaaaataaaaaatatatatatatgtatatatatttttccagacaggatcttattctgtctcccagtcttaagtgcagtggcgcaatcatagctcactgcagcctcaagttcctgggctcaagtgatcctcccacttcagcctcccaagtagctggaactacaggtacatgtcaccatgcccagtaaatttttttttaaaatttttcatagagacagggtctcactgtgttgcccagtcctaataaacactatgtgatgaaaagaaaaaagtaaatcatcctaaagttaagtctttaatgttaaatctttaatgagaaatgcaaataaagcatttctcaataatttatgggaagagaatcaactgaagaataaacatctttagtaaatcttttgctcatgtgcattaaccaatactcttgaaaaccaggattaatttactgtaccttcttaatattcctttgaaattccttatggcgcacaggtagtgtggaaaataactgctgcacgctgactgtggtccctctggggcgggggtagggggttttctggataattttcccattgtgatcaaacatcagtcgagttccaaccttcgccgatgcgtggcaggtagaaatggtgacatcgctgtgagagaataccaggcatggtgtgttcagtgagagacccatgatgttgggcactgactactcttttcttcacttgcttttctctcaaaattttcttaaaaagctgacgatccctctgagataatcaagatctaaatggttgaggagtcatcataaaatctaaggtttggcatctaaaagacagtgagacagagagcactaaacatgctttgctttgataaaagctttgatttcgtttttcaggttgaactgcaaaaccataaatgatcttaagatttatttattcacaaacacagatttgttttgttattactcttcgaacaaattttttttaaagaatctaacaaatattataattaaaatgtatatgtagggcagagcgtggtggctcatgcctgttatcccagcactttgggaggccaaggcaggcagatcacttgaggccaggagtttgagaccagcctaggcaacatggtgaaatcccatctctactaaaaatacaaaaattagccaggagtggtggtgcatgcctatagtaccagctcctcaggaggctcaggcacgagaatcacttgaacctggaaggcagagattgcagtgagccgagactgtgccactgcactccagcctgggtgacaaagagagactctgtctaaaaaaaaaaaaagatatatatatatatatataattatttataaaaatttcatatctgtgctataattaaatagtgctttggtgaaatgtttccctaaaaattgataatgaaaaccaatggtaactatcatttattatctacatgttaggttaaaattgagaattactgttttaataagggtaaccatctttttaacaatactatttgcttcatttcattcatttattgctcacatttcagaagtactatgacttagattggcagcgagacaaaacagaattcagaagctagaagttgagatgttgagatagaaaactgaaaataataatgattccaattaattttcagagaggtttctctaaggggtcaagtgagtggataaaaatattgtatcacctcagtgcacaaagtgagctcagagcttccccccgaaagccaaaagtttcaacctgagttaggtcggcaaactcttgaatcttagatgtgtgatgtttcagagctgaaagagagtgtaaagtaaggactaagatatctcaagtgctataacaacaaaatatacatgatatctagtaactggctttaaaaaactgtttttgcatttcccaagacagtgttactcaaaattctgagacatgtgacccaattattttataataggattagaaaaagtcaacttacttaagccttcgaagttttcttcttctaccccacatccattgtctgaaacttcaataagatccactccatagtccttaagctttagatctagaaagtttaaaatatttacatatttattaaaaacggacccatgctatcagtttttatattgacattatttataacatatgcaaatttaagagtcataactatacctttagttaaacatactagtgtcattttgtatatttcattgttataaagtcctttctggctatttactagcccagactaaatagtttagctttttctttctttcctctttttttttccctaggctagtgaagtgaagcagttggagtggagaaggaacaaaaaaaatctgtaactggtggtgatcaattagctgtaaaccgcgttgcactttgaccatccttttcttttgaaagaaataattttaacatacccaataaagagaacggggaccgggtgcagtggttcatgcctgtaattccagcactttgggaggccaaagcgagcagatcacctgaggtcaggagttcgagaccagcctgaccaacatggagaaaccctgtctctactaaaaatacaaaattagccaggcttggtggcgcatgcctgtcatcccagctactcaggaagctgaggcaggagaatcacttgaacccaggaggtggaggttgcagtgagccgagatcgtgccattgcactatagcctgggcaacaagagcaaaactctatctcaaaaaaaaaaaaaaaaagagaatgggttctggaatcagacttcctggatcctattttatcagctttataatctcaaaaaaaggaaatttcctatcccctaatttcctcatttgtaaaatagagaataataagttctatctcataaagttattctgcagattaataattctttggttttttttattttattattcttttcttttcttttgagatggagttttgctcgtcacccaggctggagtgcagtggtacgatcttggctcactgcagcctccacctcccaggttcaagcaattctcctccttcagcgtcctgaggagctgagattacagccatgcaccaccacatctggctaatttttgtatttttagtagagacagggtttcatcatgttggttaggctggtctagaactcctgacctcaaatgatcagcccccctcagcctcccaaagtgctggtattacagatgtgagccactactccagccctattttgttttatgtttttgagatggaatcttgctctgtccccaggctggcatgcagtggcacgatctcggcttactgcaacctccgtctctcggcttcaagcaattctcgtgcctcagtgtcccaagtagctgggattacaggcttctgccaccaggtccagctaatttttgtatttttagtagagacagagtttcaccactttggacaggctggtctcgaactcctgacctcaggtatccacccgccttggcctcccaaagtgctgggattacaggcgtgagccactatgcctggcctactttatttttcaatagagacaaggtctcaccatgttggccaggttggtcttgaactcttggcctcaagcaattcccccacctcggcctctcaaagggctaggattataggcgtgagacaccacgcccagctgttctgcaaattaaatatttctgtgcaattcttagcataacacctgcctggcacaccgtaagaacacaataaaagctgttattattattactacctagctaagtactaggcacataataggtgctaacttcaacttaaaaataataatttattactacatcaacacttgatagtcttatttcaataacaaatgtttcttaactacaacaacattcacagatcatttcttgtggcttaaaactctcccaaacttaccaatattagtggcaccagcatccagactgttttctactaactcctttaccgcagtgcttagactcagtaccacctgcccagagcaaatctgatggactgacttccgatcaataggtttgatggccttagcaggttctgtactagagaaatcagttacaagaaacaaatcaagtattcagctatatattttcatcctgattttaactgtgggaaatgactcaacactgtaaataatttatgggtctaatctattcatttattatattagcaaatacatttattatatccagaaatagaaacactgttttacaatccttaaacatgtacccaaaatacttctggatagatacttcaaattcaacagatccttactatctaattatactaagatccacatggagaaaacatacattgtatctctcaaattaccaaaatctttggcaacaatggtgtcttctttcttgaaaagtgaaagcatggctggctgtggtggctcatgcctgtaatcccagcactttgggaagcagagatgggtggataacttgaggtcaggagttcgacaccagcctggccaacacggtgaaaccccgtctttactaaaaatacaaaaaattagccaggcatggtggtgggcacctgtaatcctagctactcaggaggctgaggcaggagaatcgcttaaatccaggaggcggaggttgcagtgagctgagattgcggcattgcactccagcctgggcaacgagcaaaaaaaaaaatgaaagtaacataatttcccaacataattagaaaaaccaacagtatgctgggaaatacacaatgtttaagtcaaaatcatctcagaaattgggtaccagttatataactattccttatacacagttgcctttgataccccactccaaactgaagctgccagctgctgtcttagcaaagaccctcaaagctcttgctgtactagctttaagagttttataaaggttttatctccccttattccctgctccaatacatcctccactctatcaccagagctatttttgaaatcacaaatctggtcaaataatttttctgcttaaaaatttactagtgccccacttcctactatatgaaagttaaaatttagtcatcattggggccaaaactaccttcttttcagaatctctctaatcctttcccttcatcaagtcccctacattattattattattattattattattgttattattgttattatttgagacagagtctcaccccgttgcctatgctagagggcaatggcatgagctcagctcactgcaacctccgcctcccaggttcaagcgattctcctatctcagcctcccaagtagctgggattacaggcgcccaccatcacacccagctaatttttgtgtttttagaagagatagggtttcaccatgttggccaggctggtctcgaactcctgacctcaggtgatccgcctgcctcggcctcccaaagtgctaggattacaggggaccgcaaccagccatcccctatattgtagcacagtgaacaactgtcctgaacatcacaagctctttgagacactacagtgtataagcaggtctctgtctaaaccgctctcctcttcctcctctgcccaaacaatgtctgctcaaagaatgtatcccgtgtgttcattaacttagcaatttccagcaaacagtttaattgataacttgttaagagaaggcaggaaacctccatgaaagagaaatcactgggtatttcctacagcatttaacacatcgtaggcctttaataaacccttctgaaataaacaaacctctttactcttcattccaccttgctaagaatctcacctaagtctgtctaccatgtgaaactgcagatgacctcacagaaaatggaaagaagtatctctaaaaataagtttatttggcagcacactataggctacaggtccacttctgatttttttttttttttttttttgagaccgagtcttgctgcgttgcccaggccggactgcagtggcacgatctcagctcactgcaacctccgcctcctgggttccagcgattctcctgcctcagcctccaaagtagctaggattacaggctcccgccatcatgcccagttaatttttgtatttttagtagaaacggatttcaccatgttggccaggctggtcatgaactcctgacttcatgatccacccgccttggcctcccaaagtgctgggattataggcgtgagtcaccgctctcggcccacttcagatatttattttgaggagggagcgcatttagacacagaccccaaatttatttaaatgtctcaatacatttaaatgtagttacctaaatatatctaatatatttaaatgcagagagcaaatttgcgtttacaaatctgacatggaatgcaaatgtgctagccaagattcggtgtagcttaccagccagaaatcacacatcctaacaggtagaaacgtattgcatttttaaaaactgcgcagctatgcaaataaggatgtgtctggacgctctaccgtccccaaaataaccttaattttttaaaaaggccaggcacggtgcatcatgcctttaattccagcactttgaggggccaaggcgggcggattgcttgagctcaggcgttcgagaccagcctgggcaacgcagcgaaatccccgtctctacaaaaaaaaattaaaaataaaatactataaaaataaaaataaaaggggagagagaacaggtagaaaggaaatgcattcagtctatggggatttcacgctcccgcttcaagtccacggccctgtgatgggatgtgggcaaggcctgtctgggacaggccgaacccaactcctcacagggccgaatcctttgcccgcagcccaggaccccgaaggagcttgcctcggcctcaaggcgcacccaaggggcacgagatcgctgcaacactgaggtcgccactccggggcctccagggggctgcctcgccacgcgcctcggccatgttccccccatttccagggaggttggaatgccgtgggtctcaaagagggcgcgcgagaggggacaccggaagactgcgagccccgctcacctcgagctctcagctcgctccatggatgcaacacccgatccgcctcggggactgggaaagttccctccagggctcccacaggcgctccgcctcctgaactcccattggct

SEQ ID NO: 34 - DNA, 26957 bp, Homo sapiens
  source 1..26957: mol_type = genomic DNA; note = HGNC Approved Gene Symbol: MSH6; note = Cytogenetic location: 2p16.3; note = Genomic coordinates (GRCh38): 2:47,783,145-47,810,101
agatttcccgccagcaggagccgcgcggtagatgcggtgcttttaggagctccgtccgacagaacggttgggccttgccggctgtcggtatgtcgcgacagagcaccctgtacagcttcttccccaagtctccggcgctgagtgatgccaacaaggcctcggccagggcctcacgcgaaggcggccgtgccgccgctgcccccggggcctctccttccccaggcggggatgcggcctggagcgaggctgggcctgggcccaggcccttggcgcgctccgcgtcaccgcccaaggcgaagaacctcaacggagggctgcggagatcggtagcgcctgctgcccccaccaggtagcggggtgggggtggggtcgaaggcgggggcatagcggcggggcgcttggaacccggcgaggggaggctcgcacagggggttgggggggtgcacggcctggccctgggctcggaggaggcggggccgcagagttggcttgaatgagtgcaggggtcgagtctggagcatttgggggtgtagcttgtaaacagggtcggaggagagaggctgtgcaggaagagggctgcaggggagacgcggagagttcgggccttttggagggaggagacgcgtcccgccaggtgggggtgctgggctaaggaaggggcgacgcgcgcagctccgggtggggagggggcctgggaggtgggagcactgggggtggggcgagaaggggaaggcgcccggcccacttggtgggcggggcggggggcggggtggcgggaaggaggaatgcctgcgggaggccgaacggggagagtccggtggtgtggggtgcgaaaggaggttcctcggccggcgcggagatagtgagttggggctccagtagtcgatcgaggtagacacttagaggtagttaagagccgcggtcgccgagacgccttggggacggtgggccttcggcctaggtgaggggccgccgagggggtgggccacgagctgcgagcgcgggggggtgtgtcaccatggggaccgcggggcctaattgggcggggcggggccgtggggagccgaagtgctgggatccggctgggtccttcggtaggtaggctgcacgtgcaccgagacgaagatagaatattttgacgtatgtggaaattcgtgtcgagtggaaaatattttattttatgaaatagtgtaatttttatggggcaccactgggcttttagaggccttaatcgggcgctggacaaagatgtgtggacgtgagtgactccggggaagcctgtcgggagttgtcctcactttatgggcagttaagtgcttttttttttttttcctttttgagagagagtttcgctcaagtccaggctggagtgcaatggcgcgatctcagctcaccgcaatctccgcgtcccggcttcaagcgattccccagcttcagcctcccgagtagtcgggattacaggaatgcgcccccacaccccgccaattttgtatttttagtagagacggggtttctccatgttggtcaggctagtctcggaattcccgacctcaggtgatccacccgcctcggcctcaaagtgctgggattacaggcgctagccaccgcgcccggtctgtttagggctttttatccgggcagctggcgacattttgaaaagcttgcttttgctgtttgccagatacatatatatgtattttgagacagagtcttgctcttttgtccaggctagagtgcagtggcgcgttcttggctcaccacaacctctgtctctggatcaagagattatcctgcctcagcctcccaagtagctgggactacaggtgcgccccaccacgcctggctaatttttgtatttttagtagagacgggtttcactatgttggccaggctggtatcgaactcctgacctcttgatcggcccgcattggcctaccaaagtgctgggattacaggcatgaaccaccgagcccggccgtttgtcagatactaaacacaaagtttaatggtcgctatttgaacaaacgaagaaataaaggctcagaaaaaataactcattcaagataagagccagttcgtgttttttgtttggttttgttttgaaatggagtctcgctctgtcgcccaggctggagtgctgtggcgctttctcggctcactgcaacctctgcccgccgggttcaagtgattctcctgcctcagcttcccgagtagctgggattacgggtgtgcccaccgcggtccggctgatttttcaccatggagtttcaccatgttggccaggctggtcttgaaactgctgacctcaagtggtccacccacttcagcctcccaaagtgctgggattacaggtgtgagccaccgtgcccggccgctagttagtggttttgagtaatggatttcaaatccatttaaatccagtttaaagtgtcctaaaggaattctgagatttttctaagtgtaattatagtgttacccttgtttaagcgaccctttcccgcagtttaaatatatatagttgtgcattagtagaatatgcttgtggggaacagagccagcatccgcaataacaaactcctggttagaaaagcatgacgtattgtttacttgagcatgaattgattgttgaatccaaaccaaacgggtgtatttattgtaaggatgtactttacattcatattgaatagcgtatgttatttgtttcttgaggttgagtttaagagacttgtaaaaataaaacgtatacatttcacctcccgttatggagaggattccagggtattcaagaaagatgggcatttgatactaggtttctaaagaaactgcagtgtctagatcactctgccgagcacagcattaggcattatggatcctggatacaaccatgaacaggacaaagcaaagaggcaattgtagactccaagtggaaaggggacggagaggatgcgggtcaggctaggctctcagctctgtaaaccgaaaccagaaggacaaataagcttagacagattatagtgagagtgggaagctggttcaggaagaggaaggtctgcaaattgtgggtaggatgaaaggaggaggagggagcattggagaagttaagcagagatccaatcatgaacagtctgatgagctacagagacattcggacttactccatgaatcatttaagccttaaaacatgttgagcgtattttttttttttttgagacggaatttcactcttgttgcccaagctggagtgcagtggtgtggtctcagctcactgcaacctccgcctcctgggttccagcgattctcctgcctcatcctctcaagtacctggtattacaggtgcctgccaccacgcccagctaatttttgtgtttatagtagagacgggtttcaccatgttggtcaggccagtcgtgaactcctgacctcaggtgatccacccacctcagcctcccaaagtgttgggattacaggcgtgaaccaccgcacctggccgtgagccaccgtgtctgtccgagcatcttttaatgtttgtcatttagatttcttcttgtgctgaagtgtttgtcttttgctgtttcttttttttttcctagttctttgtcatttgtgtgtgatataaatgtcttctttcacaatgagttctttcatttagtttatggctttgttgttgttgttgaataatagaggtctcactttgttgcccaggctggtgttgaactcttgctctcaagcgatcctcccacttcagcctcccaacctgttgggattacaagtgtgagccaccacacccagccttatggcatctttcgatgaacaaattattgattataatgtggaatttgtccttttattttctctgtggttagtgtttctataggttttatttaagaaatccacagggaggctgggtgcagtggctcatgcctgtaaacccaacactttgggaggccaaggcaggccaacatggctagaccctgtctctccaaaaaataagaaaattagccaggcatggtggcgtgtgcctgtagtcccagcttcttgggagactgagatgggaggatcgcttgagtccaggaggttgaggctgcagtaagccaagagatcatgccatgcactccagcctgggtggcagagtcagaccctgtctgccaaaaaataaaataaaagttggtgaaaatgttgattatatattttaggaacaactagtaattgacatcaaaattatgggctaaagagaaagcaaaaataatgtgattttaaaccagaattcaaaagatctgtttagcgtatgtttagacaaagccattacttattatatcaaagttttaacatttattttgtgagctgtcagcttttcctcttaacatttttccccaccgtcttaaaaaaccccaagaataccggacatttaagactcacttaaagctttaaaagcacttgcaaaatcctaaaatcataatttaaggtgtttttggagggcaggagcaatggtggcaggcagtgttttgctttgttgcccaggctgaagtacagtggcagatctcggttcactgcaccctcgacctattcggctcaagtgatcctcccacctcagctttctgagtagctgggaccccaagtgcacaccaccccatgcctggctaatttttaaatttttttgtagaaacaaggtctcactgtgtagcccagatggtctcgaattcctgggctcttaagagatcctcccaaagtgctgggatcataggtgtgagccaccacacctggcctattttggcattcttgaaaaccgcaggattaccacggataaaattttaaaattacctttaaagaattcaggtttacacacaaaaaaaatttggtttgttagcagtgagtgaagaaaaattttgagaaatgtttaaaatttttagttttgttacacaatacattttactacctgtttaattatcttttttgactcagaaaccagtttcctgggtccaggatgtttagtggtactctttttcttcaagctttttagcattggaggaactgcatattagtaaaatttttagtcttagcattttatagcttactgctatttcttttctttcattctttctttcttttttttttttttttttttttttttgagatggagtctcgccctgtcacccaggctggagtgcagtggcacgatctcggcttactgcaacctctgccttccaggttcaaatgattctcctgcttcagcctcccgagtagctgggattacagatgcccgccaccatgcccagctaatttttatttttttagtagagatggggtttcaccatgttggccaggccagtctcgaactcctgacctcgtgatcaacccgccttggcctttcaaagtgctgggattacaggcgtgagccaccgtgcccagcctttttctttttctttttctttttttttttttttttgagacggagtcttgctctgttacccaggctggagtgtagtggcatgatctgggctcactgcaacctccacctcccgggttcaagggagtctcctgcttcagcctcccgagtagctgggattacaggcgcctgccaccatgcccagctaatttttgtatttttttagtagagatggggtttcgccatgttggccaggctggtcttgaactcctgacctcaggtgatctgcctgcctcgtcctcccaaaatgctgggattataggagtgagccactgcgcccggcccagcatactgctatttctttctttctttcttcttccttttttttttttttgtttttttttttttttttttttttttgtgagacggagtctgtcgtccaggctggaatgcagtggcgttttcttggctcactgcaacctctgctgcccgggttcaagtgattctcctgcttcaggctcccaagtagctgggattataggcctctgccactgcacttggctaatttttgtatttttggtagagacggggtttcaccatcttggccaggctggtcttgaactcctgacctcgtgatccacctgccttggcctcccaaagtgctgggattacagacctgagccaccgcacccggcccatactgctatttcttaacagcagagaaattatgtgtcagattctgtaagtgtaatggtatataaaggataaaatgatgttgaaaaacaaaattttttgtttaaatgcttatgtttctaatattttatttcagaaaggaatttatttcaaaactgataatggttggatccagcttttcacacaaacttttttttcctagtgaggatgcacatttatcctgtaaacaaatggaagacattatttttttaattgcttgcttagaaatgaaataattcttttctaatgatcttttaaagcatgagacctcatacatcatttaaaacaatttatactgtattttacacatgacaaagttctaaggtaacagcccttttctaagactaaagttacagtcctccctttgtatctgagggggattggttgcaggacccccctgtgaatacccaaatccttggatgtccaagtcccttatgagatgtagtatttgcatataacctatacacatcttcccctgtactttatctctagattacgtacaatacctaatagaatgtaaatgctttgaaattagttgttcagctgtattttaaattttgtattttttttcctttttttttgagacagagtcttgctctgttgcccaggctggagtacagtacagtgatcacagctcactgcacctttaacctcccaggctcaagctgtcctgcctcggcctccccaagtgttgggattacaggtgtgagccatcatacctggtcactgttttttattggttttaaatttttgatttaaaatttttaatctaggttggttgaatctggactggaacccaaggatatgtttgttgagcatactgtatttactttggaatacaactagaatgcttaacttgtatgttaaaaatactttatttggccaggcgcggtggctcacgcctgtaatcccagcactttgagaggccaaggcgggtgaatcatttgaggtcaggagtttaagacgagcctggccaacatggcaaaaccctgactctacaaaaaaaaggtaaaaataagccaggtgtgatggcgtgtgcctgtagtcttggctattcaggaggctgagacacaagaatcgcttgaaccggggaggcacgttacgccctcagttgttgacttgagtttttccgtagtttgtagggggagggtaatagagtattaggtagcttttggaatacataggagtgtaactggaaaaagattccaagcaagtctaatgaattagataatttacctaattagtaaattatgtaatcagtatgctttataataatattgtgagttagatcctgtttctgatatgtacataccatattgtataggtgctactaatttggagagcatatacagtgagtccatgcctttttcctgccatcagcattataccaaaattctgccatggtttttaaactttgattctgagaaagtttctcaccctaataacataactatatttgtgtttgtcttcatagttaaatatgcattatgatatcagcttgcatacattttttaaatgacttgaatatctgactttaaaaattattctagaatttctgtgcttcaatattaatgccagaagacttggaattgtttatttgtaggtaactgcctttaaggaaacttgaccaaatattaactaagttatgtatttccttttggcaacagttgtgacttctcaccaggagatttggtttgggccaagatggagggttacccctggtggccttgtctggtttacaaccacccctttgatggaacattcatccgcgagaaagggaaatcagtccgtgttcatgtacagttttttgatgacagcccaacaaggggctgggttagcaaaaggcttttaaagccatatacaggtaagagtcactactgccatgtgtgtgtgtttgtgtgtgtgtgtgtgtgtgtgagagaaacagacagacaggcagacttttttctatatgatgaaattaagtgtattttaccccagtaaattgcaaggggtggcagttgtgaaagcttctggcatgggaaagggatgtaacatggtctttagctggtttgttttgtggaatggaatttttatttctgtcctttgagtgacttacagcaatattatacccttaataagggtaaactaaactgtccccccatcttgaagggtccaagagaaagttaatgtcatcaggatacatagcctatagatagcgacattctctagggaaagatggagatgcgcactacctggccttcaaactactcactaatgaacacatctgagttgagtttcacaccaaactcctggaaccataactttcttttcccagatctagtcttgtttatcacagacatcaacagcctggcatgtttagcctcacttgggctaggtgcaccccatcgtctcttgtacaagttctctttctttcttttttttttttttttttctggagacagagtctcactctgttgcctaggctggagtgcagtggcgcaatctcggcccactgcaacctccgtctcctgggttcaagagtttcctacctcagcctcccgagtagcttgggattataggcacacgccacgttgcctggctatatatatatattttttttttgagacggagttttgctcttttggcccaggctggagtgcaatggcgcaatctcagctcactgcaaccgccacctcccgggttcaggtgattctccttcctcagcctctaaagtagctgggattacaggtgcacaccaccaagcccagctaattttttatttctagtagagatggggtttcaccatgttggccaagctggtcttgaactgctgacctccagtaatccacccacctccccctaccaaagtgctgggattataggcgtgagccactgtgcccagccgcccagctaatttttgtatttttagtagagacggggtttcaccatgttggccaggctggtctccaacttctgacctcaggtgatctgcccatttcggcctcccaagagtctccagtctagtacgttgtcgtactcggtgttgtaaaatccaaacaagggtcagtttcccaggtaactgggaaattcccagaatcacactctttcgtcatagtgctcatcctacaaaaaaggattgggggcattttgtctaaaattaaatgtaaatggtgatctgacatacaggtggaaagagaattgggaagttttgttctctcttctaccaacttgccacataatcttggccaagcaaagtaacttgttttttcttttaatctttttaaaagaaatagagacacagttttgccatgttgcccaagctggtctcaaactcctgcctgagctcaagcagtctgcccacttcggcctcccaaagtgctgagactacaggcataagccaccatgcccctgggctcggccaactttttcgttttcttttcaagagatgggggtctcactctgtcacccagcctggagtatagtgttgggatcatagctcactggagccttgaactcctgggctcaagtgattcccccctgttttagcctcctcagtaaccgggactagaggtgtctgccaccacacctggctaatttttatatagttttttttttttttttttttttttaaagagatgacggtcttgctatgttgcccccagggtggtcttgaattcttggcctccagtgatccttctgcatcaggctcccaagtagttgggtgatctggctaaagtaacttattttctgatactgtttacttatatttagaatgaatctcattggggttgcactggggccgggcatggtggctcacacctgtaatcccagcgctttggaaggccaaggcaggtggatcacctgaggtcaggagttccagactagcctggcaaacatggtgaaatcccgtctctactaaaaatacaaaaattagctgggcatggtggcacatgcctgtaatcccagctacttgggaggctgaggcaagagaatcgcttgaatctaggaggcggaggttgcagtgagtcaagatcatgccaccgcactccaacctgggtgacagagcgagactgtctcaaaaaaaaaaaaaaaaaaaaaaaaaaaaaggctgggcacggtggctcgcgcctgtaatcccaacactttgggaggcccaggcgggtggatcacgaggtcaggcgttcgagaccagcctgaccaagatggtgaaacactgtctctactaaaaatacaaaaataagctgaaatcccagctactcgtgaagctgaggcagagaattgcttaaacctggtaggcggaggttgcagtgagccgagatcgcgccactgcactccagcctggggaacggagtgagacttcatctcaaaaataaataaataaataaataaataaaataaaataataaataaagtaaaaagatctctcattgaaccagatgatatatgaagtctcttttaggaccaatttcgagatttaaaaaatttggcagaattactttttttttttgcagcggagtccagctttatcacccaggctggagtggaatggcacaatctcagctcactgcaacctctgcctcctgggttcaagcgattctcctgcctctgcctcccaagtagctgtgattataggcgcccaccaccaggcccagctgatttttgtatttttcagtagagttgaggtttcaccacgttgtccaggctggtctcaaactcctgaccttaagtgatccgtccaccttggcctcccaaagtgctgggattaggtgtgagccactgggctggcccagaatgatttttaaaaagagatcagtaaggccaggcagtggtggctcacgcctgtaatcccagcactttgggagactaaggtaggtggatcacctgaggtcaggagttgcagacaagcctggccaacatggtgaaaccctgtctctactaaaaatacaaaaattagccaggcatggtgacacatgcctgtaatctcagctactcaggagggtgaggcagaattgcttgaacccgggagtcagtttcttttttctttttttgagatggagacccactttgtcacccaggctggagtgcaatggtgcagtcttggctcactgcaatctctgtctccggggttcaagtgatcctcctgcctcagtctccttagtagctgagactacaggtgtgcaccaccacacctggctaatttttgtatttttaggagagatggatgtcaccatgttggccaggctgatctttaaactcgtgacctgaagtgatccacccgccttggcctcccaaaatgctgggattacaggtgtgagccaccacgcccagccctaaagttgtattttgatggaacgaactgttttgagaaataaattttaacgcgttgagtctgaactgggctgccctttcaaaatgtgaaggccccttaaagtagcacattggttggttattcttttatttatttagatatatctgatctagttgtctttgggacaaactcatatttaatatcatagctgcatgtaactgacagtgtagtctttgtcttcctgaagtgtttgtttgttttttgagatggagtcttgctctgtcgcccaggctgaagtgcagtggtgcgatcttggctcactgcaacctctgcctcccgggttcaagtgattctccttcctcagcctcccgagtagctaggactacaggcatgtgccaccacacccagctaatttttgtatttttagtagagatggggtttcaccatattggtcaggttggtcttgaactcctgacctcgtgatctgcctgcttctgcctcccagagtgctgggattacaggtgcgagccattgtgcccagctagtaagtttttaagaaagattctcaaacctcttttaaatcgtctgcctcacttgaagaggtatgccctacctgtttagggctgtagacccaggtcattagaagacagactaagtagtcctgggtgaacccatagggcaccttcaaggaggtaaaattggtgattttagtttcaccagtagtttttccctgaatatttattccttttgtgctttattgatctatctatatcaataaaaagtaatggggcataacaaattatacttgtcattcttgttcattagggcaaatgttgtaggttgagtcaagtgtccagccaacaagttattttatgtgtgtgtgtgtgtgtgtgtgtgtgtatacatatatacatttttttttttttttttcatcgagacagggtcttgcactgtcgcccaggctggagtgaagtggtgcaatctcggctcactgcaacctctgcctcccaggtttaagtgatcttcccacctcagcctcccaagtagctgggactacaggcgcacaccaccacccttggctaatttttgtattttttttttggtagagatggggtttcaccacattgcccaggctggtcttgaattcctgacctcaagtagtccgcccacctaagcctcccaaaatgctgggattacaggcgtgagccaccacacctggcatatatatattttaagatagagatggggtttgctatgttgcccaggctggtcttgaactgctgggattacaggcgtgagcctctgcacccggcccttattgtttataaatacatttctttctaggttcaaaatcaaaggaagcccagaagggaggtcatttttacagtgcaaagcctgaaatactgagagcaatgcaacgtgcagatgaagccttaaataaagacaagattaagaggcttgaattggcagtttgtgatgagccctcagagccagaagaggaagaagagatggaggtgggacacggcaagcattcagttgttatttatgttagggtgatgggggaagaaagggggagggtgtattaacaagataccttgttttatatatgtgtgtgtatatgtattattttattatacatacatgcatacttctgtagttccctggactgtaggataagttaggttacttagaatctcaacagctagcatcgtttttacttaggttttcaagcctactggcagggtaagcaagaggtagtaccattttggtaagaagtagagagctagggacagtaaagatggagtaatatatatatgagggtatagtcaggccctagaaattaattatccagttttatgctttttataaaaaaactgagatggggtcttgctatgttgcccaggctggtctcaaactcctgagttcaagggatctgcccacctgggcctcccaaagtgttgggattacaggcatgagccacagcacccagccccagctttatgcttttaattctaaaactttttttgttgtattttgcattcataagaatagatgttaaataaaccttgaaatacaaccttggctcaaacgttaatggtcatggataaagtgaattaaaacttgttaggggccaggtgtggtggttaatgcctataatcccagcactttaggaagctgaggcagttggatgtcctgaggacaggagttcaagaccagcctggccaacacagtgaaaccctgtttctataaaaaatacaaaaattagctgggcgtggtggcacacacctgtagtcccaaccacttgggaggctgaggcatgagaattgcttgaacttgggaggcagagggacttgggaggcagagggtgtagtgagccaagatcgcaccactgcattccagccagggtgacagagcaagaagactgtcaacaacaacaaaaaatgttatagaagtgaaaaaaattgattaatttagaacaagcttgtccagtctgtggcccaggatggcgtttaaatcagcccaacacaaatttgtaaactttcttaaaacattttgtgatttgttgttgttgtttagctcatcagctatcattagcattagtgtattttatgtgtggcctaagacaattcttccagtgtggcccagggaagctgaaagatcattatcctctgatctatcatattaatgagctgcatcctaaaagacattcatctataactaagctcagtttcatgttttgttcctttttcaatagataagatagggaatgagcaagttaataaagtgggtattttaattttaaggttgaaactaaggatcataacattatcagaggtctagaactggatggcagctacagagatcatttagcctaatactggtttaacaaataatccgggagatccgtgatatgtgaatgtgctaggcctgagatgagacagccaattgtggaagagcaaacactagaaccagtataagttgcttactgctttcttatgctattaatgagcatatcgcctcctgatatttatgatatatggtcatgccaacagctttgtcataaatagaactcccatggcagcaatcacttaatcttgtagttagaggtggggtctcaccatgttgccgagctggccttgaacttctgggctcagcgattttctccacaggcacctgctactgtgctcggtgcagcactttgtgtttttgaacataacctcaagatgttattgtcttcatagtaaaacaaaagatgaggcttagaactggatcactttgcctgtctcttcttacctcctcccagttcaaaatgcttgcatctcttaatagctagcattcccttggattttgcacatgagctcaaactcaagcctcagcacaatcttttttatagttttagtcttttagccagagtcgacttaccccccatacccactctgcttccttcataatgctgctttccctgggcagagaatccttgcccttcttgtattatgtcactttgtggggttggtgtctgctacacttacagcaagtccagagattttttttccaccacgtttgcaggagaactattggcatggaaaatgacaattgttttaatgtcaagtgaaactgaagttgatgttcattgagaggtttctaatttctagaggtgggttctttttttggcatatgaagttgcagcatattaagagaatttacagtagtacagatggggttatcccatccacaacttatgatggggttacataaactaaaaacgtgtttaatacacctaccccaccgaatattgtagcttgggcgtagcctaacctatctcagacgtgctcagaacacttaaatgttagcctaaagttgggcaagatcatctaacacaaagcctattttataataaggaattgcctatctcatgtaattcatcgaatactgtactaaaaatgaaaaacagtggctgcacgggtaccattataaagtcaaaaaatcataagttgaactgtcttacattatggttttccaaattttgatttgtttttaaatactctttccttgcctggcaggtaggcacaacttacgtaacagataagagtgaagaagataatgaaattgagagtgaagaggaagtacagcctaagacacaaggatctaggcgaagtagccgccaaataaaaaaacgaagggtcatatcagattctgagagtgacattggtggctctgatgtggaatttaagccagacactaaggaggaaggaagcagtgatgaaataagcagtggagtgggggatagtgagagtgaaggcctgaacagccctgtcaaagttgctcgaaagcggaagagaatggtgactggaaatggctctcttaaaaggaaaagctctaggaaggaaacgccctcagccaccaaacaagcaactagcatttcatcagaaaccaagaatactttgagagctttctctgcccctcaaaattctgaatcccaagcccacgttagtggaggtggtgatgacagtagtcgccctactgtttggtatcatgaaactttagaatggcttaaggaggaaaagagaagagatgagcacaggaggaggcctgatcaccccgattttgatgcatctacactctatgtgcctgaggatttcctcaattcttgtactcctgggatgaggaagtggtggcagattaagtctcagaactttgatcttgtcatctgttacaaggtggggaaattttatgagctgtaccacatggatgctcttattggagtcagtgaactggggctggtattcatgaaaggcaactgggcccattctggctttcctgaaattgcatttggccgttattcagattccctggtgcagaagggctataaagtagcacgagtggaacagactgagactccagaaatgatggaggcacgatgtagaaagatggcacatatatccaagtatgatagagtggtgaggagggagatctgtaggatcattaccaagggtacacagacttacagtgtgctggaaggtgatccctctgagaactacagtaagtatcttcttagcctcaaagaaaaagaggaagattcttctggccatactcgtgcatatggtgtgtgctttgttgatacttcactgggaaagtttttcataggtcagttttcagatgatcgccattgttcgagatttaggactctagtggcacactatcccccagtacaagttttatttgaaaaaggaaatctctcaaaggaaactaaaacaattctaaagagttcattgtcctgttctcttcaggaaggtctgatacccggctcccagttttgggatgcatccaaaactttgagaactctccttgaggaagaatattttagggaaaagctaagtgatggcattggggtgatgttaccccaggtgcttaaaggtatgacttcagagtctgattccattgggttgacaccaggagagaaaagtgaattggccctctctgctctaggtggttgtgtcttctacctcaaaaaatgccttattgatcaggagcttttatcaatggctaattttgaagaatatattcccttggattctgacacagtcagcactacaagatctggtgctatcttcaccaaagcctatcaacgaatggtgctagatgcagtgacattaaacaacttggagatttttctgaatggaacaaatggttctactgaaggaaccctactagagagggttgatacttgccatactccttttggtaagcggctcctaaagcaatggctttgtgccccactctgtaaccattatgctattaatgatcgtctagatgccatagaagacctcatggttgtgcctgacaaaatctccgaagttgtagagcttctaaagaagcttccagatcttgagaggctactcagtaaaattcataatgttgggtctcccctgaagagtcagaaccacccagacagcagggctataatgtatgaagaaactacatacagcaagaagaagattattgattttctttctgctctggaaggattcaaagtaatgtgtaaaattatagggatcatggaagaagttgctgatggttttaagtctaaaatccttaagcaggtcatctctctgcagacaaaaaatcctgaaggtcgttttcctgatttgactgtagaattgaaccgatgggatacagcctttgaccatgaaaaggctcgaaagactggacttattactcccaaagcaggctttgactctgattatgaccaagctcttgctgacataagagaaaatgaacagagcctcctggaatacctagagaaacagcgcaacagaattggctgtaggaccatagtctattgggggattggtaggaaccgttaccagctggaaattcctgagaatttcaccactcgcaatttgccagaagaatacgagttgaaatctaccaagaagggctgtaaacgatactggaccaaaactattgaaaagaagttggctaatctcataaatgctgaagaacggagggatgtatcattgaaggactgcatgcggcgactgttctataactttgataaaaattacaaggactggcagtctgctgtagagtgtatcgcagtgttgggtaagactttgaacaagcttgttctcaggctttgataagtagtgctgtttgccagctgtatattatccctaaaaataagtaataaggtatatatggtacatattttgacatgcatatacatatttgcatcctgactaggctgcccacagcaatttaagttacttgaaactcgcttttatcttagtagccctttggcctttcttcagtttttttttttttttttttttttttgagacatggtcttgctctgttgcccaggctagaatatggtgacacaaccatggctactgcagcctcgacctcccaggcttaagtgatctttccacctcagcctcccaagtagctgagattacagatatgcaccaccatgcatggctaatatttaaatgtttgtagagagatggggtctcactgtgttgccaggactggtcttgaactcctgggctcaagtgatcctcctgcctcggcttcccaaagtgctgaggttacaggcatgacccattgcgcctggccctttcttcagtctttaataatcgaacaaaaggtttttgtttttagacagtgtcttgctctgttacccaggacagacctctcgtgtcagcctcttaggtagctaggatttacaggtaagcaccggcgtgccctgctttatttttttggtgggggaagggggaagggagttgaagcttccctatgttgcccaggctggtcttgaactcctggcctcaagtgatcctccagtctcccaaaagtgctgggattacaggcatgagccaccgctcccggcccaaaagatttttaaatgtgttatacttcatgagacaggctttattttagatcgaattttatttatcaataaaaagttgagctttttattatttggtgaatactgtttcaaggtgctttgttacactatctgttgatccaacatttaaaaattgttttattacaacctttgcatttcagtgaatccatctgcatacaattttaaaagaatcattccttttttctgtagccaaattgtcaaagattctttcctacaattgatttttcaaagccctgagttaggaatttacaatttggcaaccatctcaacttcataagcaattttgttctttaaatgtcacggccaacattacctggaaccattgctgttttatagtttaggtttatgttgtatattttttttaattttttagagacggggtcttgctgttttcagactggagtacaatgggatgactagctcactgcagcctcaaactgctgggttcaagtgattctccttcctcagcctcctgagtagctgggactacaggtggtcaccatcacacctggctaatttttgtatttttggtagagacagggtttttcccgtgttggccaggctgttcttgaattcctgacctcaaagcgatctgcccgccttgatctccgaaagagctgggattacacgcatgagccactgcgcccagccctgttttttttttttttttttttttaaataatggtagtttacttgaatttgtaacacagtaacacaaaactattttgatctgaacgcaagtatctaatggaacagaataatatacttccttttagtgtgctgcatttggttactgggtaatttaaaattcttcctcagcacaggtgttcaaaaaccagtcttcagagattgttttcatatcagtgtgccaactttggcacattctgctaagtaagaggcttaagtgtagcatgtttctgctgttttgtgtttgttttgttttgttttttgagacagagtctctctgtcgcccaggctggagtgcattggtgcgatcttggctcattgcaacctctgcctcccaggttcaagtgattctcctgcctcagcctcctgcgtagctgggattacaggcatatgccacgtgtattaggcactgctaatttctgtatttttagtagagacgaggtttcaccatgttggtcaggctggtcctgaactgctgacctcgtgaactctgcccgcctaggcctcctgaagtgctgggattacaggcgtgagccaccgtgcctggcctctgctctatcttttagctttcccttggcacttctatggtccagatgttagagggtaagtattttgatgggggagatcgttggactgtaattgaaagttatgtcttataatgaaatgtgttatataaagaagacctataaaacacttaggctgataaaacccccaaacgatgaagcctcacttttaccctctcttttaacagatgttttactgtgcctggctaactatagtcgagggggtgatggtcctatgtgtcgcccagtaattctgttgccggaagataccccccccttcttagagcttaaaggatcacgccatccttgcattacgaagactttttttggagatgattttattcctaatgacattctaataggctgtgaggaagaggagcaggaaaatggcaaagcctattgtgtgcttgttactggaccaaatatggggggcaagtctacgcttatgagacaggtaactgattcttaaagttttgttatcagaaagtcatttgtgacattaggaataacatacttaggtgatcattttccaaacacagttacataaaagtcagccagtgacttaataggaagcaaagggaaattactccctgtgttataaaattgagaattatatttagctgaaacatcgatgcttaatgttaaggggaatatatgttaaaaaggggaaggaggtcagtcattcaggtcatgaggccctttgacttgaattcatttcctcagaaggtaggtatattcatagtgaacaaaaatacaaaggctgtatgaaaagatgaaaatgttacaggtttatccttaaattagactcatttgcagaaatgcaaatgaggtaagaaagcaaatatagttcatgacctctagcaactgttgaaaactgctctttagggatgacatgctggcccttttttttttgttgttgccaaggctgaagtgcagtggcaccatcacagctcactgcagcctcgaactcccaggttcaacccttcctcctgcctcagcctccccagtagctgggactacagatgtacaccatcatgcctagctcatttttaaaaaaattttttatggcattgtatttatcttctctttataaccaggggttgaccagccacagaacttgtaaagttttttatatttttaaaaggttgtaagaaatagtagtagttggctggtccccgctgctctcctgcattatagtatacttctgttcacctagtttgctagagagaggcagtatagtgtgtatagtgatttccaaactttttctttaaatcagaatcacctgaaagaatgtgacaacgtgtaaaaaaaaaaaaaaaggtgcagagattccatcctgacatggattcacttgattggaattgattctaggcatctcagtagttttaaagagctcctaggtgattctattctggccagcgttgagaatcactagggtagtgggttggtaagcaggctctgatgttttaaaggccaggtgaggccctatgcctcttgtctctcttagcctcaactttctccatgttagcaaatggatttcagaacagaaccaacgtacatgtgattgtgaaagttgttttagagtgcctagctcttacgtaagggttcataagaaagacaaaagtttatgaaactgttactaccagtcataaaagaccttttcctccctcattcacaggctggcttattagctgtaatggcccagatgggttgttacgtccctgctgaagtgtgcaggctcacaccaattgatagagtgtttactagacttggtgcctcagacagaataatgtcaggtgagttttttgtttcccacttaagttctcattcagtcatttagatgtgataaaagatatttgcttcttgtatatgagccttttaaatctaatatttgatttttctggtgttactttaaaaacatcactttttaagaactgcatagtctctctctcttttttttttttttgagatggagtttccctcttgttgcccaagctggagtgcaatggcacgatcttggctcactgcaacctctgcttccaggttcaagtgattctcctgcctcagcctctcgagtagctgggattacaggcgcatgccatcacgcccagctaattttttgtatttttagtagaagcggggtttcaccatgttaggctggtctcttaactcctgacctcaggtgatctgcttgcctcggcctcccaaagtgctgggattacaggcgtgagccaccgtgcccggccaataattgcatagtctcttaatgagatttaatcttttataccaatatgtgtagctcatgatagctatataacctagaagatgaatttatgtaatatgatttgcaaaatgagtattcatttgtgatttttttttttttaaggtgaaagtacattttttgttgaattaagtgaaactgccagcatactcatgcatgcaacagcacattctctggtgcttgtggatgaattaggtaagacattaaacttctcatttgaagactatctatcttaaaaacatttgtacaaataactatttttatagaagattatctgaagtacatttaaacaatatgaatgtttttagagcacgcactcaccattgtggcacagaccgatagttggagataaaaggtgatattgtgaaaggtttttgattacccattaattattaggccttacactgtttagttgtaataaaacatttgttatactacggggatgagaacactaataggaggactcaggaagtttatgaccttgagcgatactgtattttctttaaaagaaacctcactccccatgggctgctaagcagactcgtgtagctaaacaaggcctatttatagaatgcttttagacgtggatgtactaaccgatgttgcttttctgtcctagcatttttgttttaattccttttttgttttaattcctttgagttacttccttatgcatattttactttaacaggaagaggtactgcaacatttgatgggacggcaatagcaaatgcagttgttaaagaacttgctgagactataaaatgtcgtacattattttcaactcactaccattcattagtagaagattattctcaaaatgttgctgtgcgcctaggacatatggtatgtgcaaattgtttttttccacaaattcggttttttgagagggcacttctcttgctagcacatgtatcgctaatatttttctttcttaaggcatgcatggtagaaaatgaatgtgaagaccccagccaggagactattacgttcctctataaattcattaagggagcttgtcctaaaagctatggctttaatgcagcaaggcttgctaatctcccagaggaagttattcaaaagggacatagaaaagcaagagaatttgagaagatgaatcagtcactacgattatttcggtaactaactaactataatggaattataactaactgaccttaagtttcaaagaaacagtaaaaggggaagggatgatgcactatgaaaaaacaaaaaaacttttttttttttttttttaattttaagggaagtttgcctggctagtgaaaggtcaactgtagatgctgaagctgtccataaattgctgactttgattaaggaattatagactgactacattggaagctttgagttgacttctgacaaaggtggtaaattcagacaacattatgatctaataaactttattttttaaaaatgaccatttttccattttctttctaggaaattaaacccttttaattcttatctaccttctacataatggttattgaatactccacaatatattaagtctagatgttatggtacatgcatacactttcaggctgttttatacccactgtcaccaatacacataaatgggggaggaaaagctatgaaactgtatagggctgtatatatacttgtctcagcttaatgcaggaaattggtttaatttccagcagttttgtctaaactgttcaaaaaaaaactatgaacagagttcaaatacaggactgtttgttttgaagagactttctaaagtgtacttaaaacatagtagttttttacctttcacaaaactgagttacaagaatacttttgttttacagtgcatcccttcctaggaagtctcattaaaacactcactttttctaggggtgattttgaatgctgcacagggaagggaaggaaataatagtcttaacttttcttaaaggataccagaaacattgctggatataatttaagattagtgttttctctttcatagaaagaacgtacatactgggacatgagtacagttacagcaagtctaggtgtgctaacaaaacagggcacattcaagtacagtaagattttgcttgaaattaaaaacaaactacatgagattaaagcattaaaatcatatttctcaatctgaatacatgttaaaaaaaaaaaatcaaaaggaacgcagaagtgctagctcacatttttaccatattacaaaagcaattggtacccatgtccataaaggcagcaacaaagctgcttgtctattgaagattactactgcaaattggactgcattcaatgctagttgtaaaaacaccagcttttcagaagttggtatctgtacaaaattgcagcttattttcttcacttctgtcccttcaagtctttacacagtaatgctaaaacacccagctttgagatcctgagtcaatatattgccactttctttttggtagcttgagcttcatagtgtcaactgaccttgtgtatccatttttaatacagtctcttcctgtagcatgggcaaatattttaaatcttcttccaaaaaagtgttttaagttatgatgttacaatggcaggactttttctttagggaaggaattcagttgtgctgcaatgtattagattctataggtggagcagagtcatatagtgtatctgtatcatgtgtaggctcaccagctaatgtacaaggattagacagtgttccagcaccacagtcacagaaaaacctaaagcaaaatgaaacccaaatattagaaaagtgagggggaaagtaattgggtaatatatcaagcaagtgtgctacatacctatcatgtctaataaactctacatcatgtccctgatggcacttcttaatgcagttcacacatatggcatttcgatctgtggtgttacaagtatgacatctaaaaagcaaaagcttaaattacttttctcaaacatgtcattaatgcaaaacattccattctgtttatatattactatgacctttggctttaagaggaccaaaacaaaattctttgtggctccagcccagattaattctgaaaaggaactttaatggagtaagtgattttcctgtcatctgtgtcttcggagggaagagaaatgatttgtaaattgtataaaggcagttctttccactttaaaagcctctcaaatgtttctgggctgaaaacaatttttggaggcgtgaagagtcaaaactgtcacagtgactgggatatatcaaacacttaaccccgacatctttaccttgaaatttctaggaaaacattacacaacatgagttacatgaatgacatcagttactgtagcattaggtttttccatagttatggtctttgttttgttttgtagagacagggtctccctatgttgcccaggctggtttagaactcctgggctccagtgatcctcccacttcagcctcccaaagtgctaggattacaggcataagccaccacgcctacccacagttacagtcttaaacacgatcttcaagtagattgatgataaaattttcagttagttatagtctcaacaccggcaaatagccaaaaatgctaggcattgctaatttaaaaaggaaatcagtcttcctcttttcaggactcaaatatatttctaagttacctgtagaaatcatgcatgggatagctggtataacttgatattttatataaacattggcctctactaacagccttttctatggcatcttgattgttcattattttgttatctgtaataaaagaaagaataagtaaaaattcagaggaatgttaatattttaaaaaccaaagattataggattattctaacagaagagccactatttttaagagctttaaatgaagctaaccaatgaagtaattgtaagaaatcagctaagaatagaattttccttgtataagatactccaaccatttagaaccaaagctctgtttctttcaaaatctatcttaaactgttgctaacttggagagtgacataaggaatcaagttataaaacggcttctgattatctttcatggcatattgcatatatttataggtatagcagactccaacatacctttcattgtcacattaacaccagatgctaaaaataagcctccaaaccggttgttaaaaatctgattgccttctagtgttgcagttgcgtgatttgtaatttcaatacctgaagtaaaatttacaaacaagtagatacatcactttatactgcttcttaaaaacctgaaattagcaagcaaatgtaaactgcttcttttatagaagtacattaaccctcttaatgtctactgaataaaatgtagatacctatttcaaccaccaacagtaacattcacttatcaatgactatggtcaaaactgcaattaactttcgcaccaacctaactgtcttaaagtttaaatacatgatacttggatttcatttgcatccattttaacatctctttttctgttgcagatttaaactggtaaattcatctgaggaattgaatctatctgtattcctagtggtaatacaagcctgcatttattctatcccaataaatgtttcataatcacga

SEQ ID NO: 35 - DNA, 54092 bp, Homo sapiens
  source 1..54092: mol_type = genomic DNA; note = HGNC Approved Gene Symbol: CHEK2; note = Cytogenetic location: 22q12.1; note = Genomic coordinates (GRCh38): 22:28,687,743-28,741,834
ccaggttccatcaggtttttaattgtacatcagtgactgtgaaaaagcaattattcccataattaaaatacaaactataaaaaaacagactcaaagaaaagaaagatgacagagtgaaagaaggtacatttctttcgtgttcaaaccacggagttcacaacacagcagcacacacagctgggcgctttgtggtctcggcaccctcggcttccccttcacggggccgctttcgactagtagaaggctgaaaataaaggaaaatggagaaatgttcaaaagaaaatcactggcttctttaagattatcaaagttcctcaatatgcttccagtaaagtgggggcatttgatgtgaaattctagaaccaaaaattactggttgtcatcattgacaactgagtcctcaccacagcccccaactcagacatgcttatctaatagatatttctctcccttatggcttctgacctctgaacgatgtatactgaaagcaagtagcataaccaacttcctcttgatcgtcctcttctaaatatcaagtttaaaaggactataatacctctcagttgaagccccaagtcttggtcttttgcgggaagacaacctttgtgccttagttgttttcccatatataaaattgggaggaaggctgggtgcggtgactcacagctgtaatcccagcactttggaaagccgaggtgggcaggtcgcttcaggtcaaaagttcgagacaagcctgaccaacatggcaaaaccccatctcacctaaaaattcaaaaattagctgggcacagtggcggacacctgtaatcccagatactcgggagactgaggcaggagaactgcttgaacccaggaggcagaggttgcagtgagctgagattgcaccactgcactccggcctgagtgacaaaccaagactctgtctcaagaaaaaaaaaattggggggaggaaacagtgggaaaaaggacagctaccattcaacaacaacaacaacaacaaaaaagcaggactggaattaacttatactcacaaagaactttaaagaataaaattgtaatcaaggaatcaactactgacccaaattttaatttgttcaacaaatttatatttgagcctctaatagagtctttcgaaattgccttgcaggtgaccttttggatgacaatccctagctgtgcttatcggtctattatgtgttagatattaaacatatcctgcatttttaaatctaagggtgctggagcgaatcaagttaaaacagagtttctactacattataactgaaacaatgttaagcaattgctactcaggaaaatcttgaatttcatcatctttgcttatcagctccttaagcccagactacatttagtgatcatcaggaatacgaatacctgggctagaacctggggtagagctgtggattcattttcctcagacagaagatcttgaaactttctcttcatgtcttcatcctgtgagggaattaaaaacataagtagctgtgtctgaaggataataaactcctagaatgacagggctagcatgcccctgtggaaagagggaggaaaaatgtccgtccaagaatcatccccttgatgaagctcccacagcgaaggcattatgtgttgcccgcctctaccttcccagaggagtctaattagcagtcaatgctccatcaatcctggctgactcacatccacatgcctaaaagctctcagtgggtcaatcacagcctccagcagtcaagagtttcttaattagtatccaagatcctgagaaaggtggcaatcaggaggccagaggctgggcctgactccgtgcagctcctcaaatccttcccggaccactctccacctgctgcccctgccatgaatgaggccagtcacccagactgtcctaacaaccagcccagcaccctaggaaaattcacccagcagatgccatacaaattttcagaagtacttaagcccacagtatcccagagctcaggtctaatgagaaagggagacaataaacagaaccaagtattttgtttctgctgcaggagcgggaggtgaggggtttcatgctgcaggagcaggagatgaggagggcacagacagtgtgtatgcgagtagctcccacctctctggatgctcacttctgcagggttcgaggatttgcattaggaaaccctgagaggtggtctggtgcagctctccccatcttcagcaaggtgaaaggaacatccataactaggaatgtggcctttgagtgctggccagaagcccagctcagccactcacaggtggcatgtgcagaatacagacccagagttatctgattccagtgcctcatgtactttcccacccaactccagcccctcctcccactgagccaagcataccacagtggggaaagggagaggatacagtaaagtcctccaccatttggcaatttgatggatatggaaattttacaacactaggttgggcatggtggctcatgcctataatcccagcactttgggaggccaaggtgggagaattgcttgaggccaggaatttgagaccagcctgggcaacatagtgggacttcgtcactacaaaaaaaattaaaaattaggccaggcacggaggctcacgcctgtaatcccagcactttgggaggccaaggcaggcgaatcgcctgaggtcggaagtttgagatcagcctggctaacatggtgaaaccccttctctactaaaaatacaaaataagcagggcatggtagtgcacgcctgtaatcccagctactcaggaggctgaggcaggagaatcgcttgaactcaagaggcggaggttgcagtaagccaggatcacaccactgcactccagcctgggcaaaagagtacaacactgtctccaaaaaaaaaaaaaaaaaaatttaaattagccagacatggtggcatgcacctgtagtctcagctacttgggaggctggggcaggaggatcacttgagcctgaaagtcatggtgcagtgatcatgccactgcactccagcctaggtgagagagcaagaccctgaggaaggaagaaaggaaagaagcaaggaaggaaaaaggggaggggggacgaaagaagggaggggaaaggaatggaggagaggggagggggaaggaaggaggaagaaagaaagaaggaaagaaggaccaggcacagtggctcacgcctgtaatcccagcactttgggaggccaaggcagggcagatcacttgaggtcactctgttttgagtttctcagtgtagctccccattgccatttgacagcagcaagctcatctggattctactccgcaccctctcacggccttacttaggatctcaattatcttgcagtgtcactctcaaaagtccatctcttggcagcccttcagtgaagccaaacagagtggtcacaagcctaatcaggcctgtatttaaaacaagtaatcaggtcaggcacagtggctcatgcctggaatcccagcactttgggaggccaaggtgggtagataacctgaggtcaggagttcgagaccagtctgaccaacatggtgaaaccccatctctactaaaaatacaaaaatgagctgggatggtggcaggcacctgtaatcccagccacttgggaggctgatgcaggagaatcacttgaacccagaggtagaggttgcagtgagctgagatcacaccattgcactccagcctggtagacaaaagcaagactccatctcaaaaaaggaaataaataaataaacattgattttcttcatgatgtctacaattattccaaaatattaaattagccaggaacagtggctcgtgcctattatccaagcactttgtgaggctgaggcgggaggatcccttaaggccaggagatcaaggctgcagtgagctataattgcaccagtgcactccagtttaggcaacagaagaagaccttgtctccaacagtaaataaaataaaaattaaattgtaatatcccttgaaagtaaacagaagaaatcctctatttcaggcagtaaatatgaggcagagagtagatgtaagggatgctcccaaaactgggcactctgttaatgacaaaacagagaccagaatccacattcccaacactcagttcagcgacagacccacaaaaccatttggttttttcaaaaacactgaattttcccaaaataaaacccaaactatcactaacagatgttttagatggtcagtcttcatccttgtcttcattcaatgctcattcctcctttcactgcaaaaacaaaaggtggctaaaagagtattccagggagatcctgcaacagagttgaacttcaccttctccttggttgttaataagttttctttgacacaaaaaagtacaagaaagataggctatgcttgctcataaatttcaggcagatgcaaaccctgttcccaggctcaactggccagctctattttttgttagagatgaacacagctcctgtacctctacatttagacccaagagtttccctattaggacacatgaaaagagccaaaagacatgtttctctttttcatcaaaattaaaatccccacatgcaaaggcaccctttgtttccaaacccctttcctccagggtcccactgtttcaaatctgtgtggtctattaaatgctaaatcatctgacagatttcttctggggagactgtagtttccagggcaacatccaaacacatatatgtctttttttgtttgtttgtttgtttgttttaagtttttgttgttctcaacctgagctggcctgagcaaaactgttaggtgtagaggattggaacagagaacagggacagtcttcccagagtcccagaagtacgggtcggaggctggactgcccaaggagttcctggaccagtaatccccagagaaacagcatttagctcaagtaacagcctctagctcaagctaccagttctgtcccccatctccacagaaaacggattgatacagtttggctttgtgtccctacccaaatctcatctcaaattgtaatccccaggtgttgagaaagggacctgttgagaggtgattggctcatgggggcagtttcccccaggctattctcgtgatagtgagtgagttctcaccagatctgacagtttcataagaggatcttcgcccttcacttccttcacaagctctctcacctgctgccattaagacatgccttcttccccttccaccatgattataagtttcctgaggcctccccagccatgtgcagctgtgagtcagttaaacctcttttctttgtaaattacccagtcttgggcagttctttatagcagtgtgagaacagactaatacacaaaccaaaaaaaaattcatagaaaggggcatgtctgtgctgaatggaactgctcattacagaagaccagacatctatcagaaaaacctgcccaatgccgtggctaattctaaaactaaagattaacccagcaaagccacaacatacttccaactcttggcagttccagatgaggtcagcatttaaaaatggcagccccaacccctagcaggagcacagcggtaatacagatgaaaagtgcaggtgacagccttcattaaggacacatttactcacctgaatgaacaagcagtgggaccctttatacccagtcacttgggcttgagaaatagctggattctccccagggaggctgtcctcctccccctcccccacttccctgatttaaggttgaagatggctggaatgcaccccacctatgaagagcagtggacatggctgggggtagagccagaacaagcactcaaaagaacacaggccaaacaggagactcggggcagccaagtggaaccagaacaggacataaagtgagcgtgtacatccaacagccatgagtaatatcaaaaaggttgtagcctggccagcacggcgaaaccccatctctacaaaaaatacaaaaagtagctgggcatggcagcatgcacctgtaatcccagctacttgggaggctgaggcaggagaatcacttgaacccgggggccagaggttgcagtgagctgagatcgtgccactgcactccagccagggtgacagaacaagaacctgtctcaaaaaaaaaaataaaacaggttgtaacccatcctccaagataccccccatacatctaaaacaattagattaaacactcaacaaagtaaacatgtttctgtcctctgtctcatgtctctcaggcagcagggcttcccatgtattttatgctagcaggcactgtcccacacccacctgaagccacgggtgtcttaaggcttcttctgtcgtaaaacgtgcctttggatccactaccaacaacttcttgacaaggtccagagctaaagcaacaattgggcaaatcacagtgaaaaggataaatatattatcagtaagagtatgccagaattaacaggccaccattcagaaagagcagagagggtctgagatcatcacggagtcagcagacagggccccctaatcttcctcactctctgtattcagagtactgtgagaagaccaggaatgataatgacactccctgtctcctgctgctgggacgtcagtcacgacctcttcactgcctgttccctctcttgttgctagactcaaggtcggactaattaaagctaaacttctacccaattctaagatacttgggatgcacagcaaactctctctgacatctacagatggataggtgacagttactcagcgagggagaggctccctggaactgcagacttgtcagaaataaaacttggctactccagcaagcaacaaatgcacgctggcctgtatattacaacattattattccttaaatattctgacatttaacacaatcacctatgttatgttatttgacatttaattttctactttctcttcagggaactaaagttgccaggataaattataaaatacaaggtaactaatgacatctagtttttacatgcttgcttactcaaaggaaaccttgtaactaaaaagttacaagtgcatttattttgctcactaaaataggtaccaggcacttgtgtacatgatacttaaccctcacaaaaaccttttaaggtagggtttattgagggtccctttacacagaaagaaattggagatggaggttaaataacttgcctaaggccacacagctaagtagtagcagacccaggacctgagtgcatgctcttaataatttccagtgcctctcaaatggtgtgaaactaacaatagaaaataagaacagaattgacaggagaaaacaccatggaatttgggaagaaactcccaccacagcacatacacattttagcataccacaaattcttaaccctttcatattcatacctttctctgagacttctgcccagacttcaggaatgaagttgtattttccactggtgatctgatccttcagtgacacttgagtcctatgctcagagaaaggtggatacccactaaggcttaatattggtagagagagaaaggaaaagaaatcaagtggcattctcagtggcattcagatataaagatttctttttcagcataatgaaaagtcagatttttctttaaatcaatggtcaaaaagtgagctaggctgggcacaatgccttaggcttgtaatcccagcactttgggaggccgaggcaggaggatcacttgagcccaggagttcgagaccagcctgggcaacatggcaaaaccccatcactacaaaaaatagaaaaattagctgggcatggtggtgtgcatctgtagtcccagctactcgggaggctgaggtgggaggatcacttgacccaggaggcagaggctacagttagccaagatcaagccactgcatgccagcctggacaacagagcaagacacatttgtgacttcatctaatcacctcctaccagtctgtgcagcaatgaaaatatttcttaccagataaaaagaataactcctaaactccagcagtccacagcacggttatacccagcagtcccaacagaaacaagaacttcaggcgccaagtaggtgggggttccacataaggttctcatgagagaggtctctcccaaaatcttggagtgcccaaaatcagtaatctaaaattcagtacaaaagggaataatgttgaacttgccataaaataaaaagattaacatagtctgccagtccaagaagacacgtaggctagatcagtttctattgtacaattcacacctgccattaatctggaatttacagattcatgtctttgcaagttaggacatttaattttgcttaaattaaaattcctgagcctaggaatctcaacactcaggctttccaacttaacctatgtcctctgtaatcttacaaaaagcttattatctttatcacagacacttcaggattctaattagttctacatggttcttagaccccagtgtctcaaacttggctgcgctatggaatacctggggagcttggaaacacatgcttatacctgagtgccactctcagcttctgaggtaaagcctgggtgtcataaatcctaacaagagattctaaagtgatgccagacttgagaaacagggaaaggcagcgcatgtgattactcattcattcattcacctattctgagatgatgtctggcccttttgcacaggctggagtgcagtggtgcgatctcagctcactgcaacttctgcctcccaggttcaagtgattctcgtgtctcagcctcccaagtagctgggattacagacacccaccaccatgcccagctaaatttttgtattttttgccatgttggccaggttggtctcaaactcctgacctcaggtgatctgcccacctcggcctcccaaagtgctgggattacaggtgtgagccaccatacccagcccactcgtccatttagacccctcctctctctctaagcacaaaggtcacttgtacacaacagagctcaataaatgctcattcgaatctggataagagcagtatcacctgatctctaaaataattggtaacagtgaaagggtcagattctcatcctttttacgctcccactttttatttgaggaattaaaagtttctgaacaagaatctacaggaatagccacatacagaatgccaatttcttacctttataagacagtcctcttcttgagatgacagtaaaacattctctggctttaagtcacggtgtataataccgttttcatgaaggtactacacagaaaggcaggcatgaccctcagattcatgcagtagatacttaagtagaatcaaagttaccaacacacacatctcacagctgggtgaaaccgtaagccgtgatacacacaaccatattctccaaaatcatagaaaactgttggggtaaagtttacaaatttgtttgagaagatctttaaaaagcagggaaatgaaaaaagcaacttagaacaattaacctttcatttcactttaagataataaacaactcttcacacagcagaaatgtaaggtgtcaatttcaataaaaattcaaatgggtaacagaaaatgttttgagaacataccaaataaacacaaaaattccaccaaaatgatatatttggttattgcagtcctgagaatatttttaaagggaacctatacaaatatatatttgtaaatatctatttatgtgatacaaatatatatctgtttatgtgagttaacctattcctcaatgcaaagactttgtctttgaaaaaactattgtctgaaatagcatataaaaatgaacaaacaccaacatactatgccatatttcttttcttttcttttctcttttttttttttcttgaaacaaggtctcactctgtcccccaggctgaagtgcagtggcaccatcttagctcactacagcctcaacctcctcagctcaagtgatcctcccacctcagcctcatgagtagctaggaccataggcacaaagcatgccacttcaaccagctaacttctttatttttttgtagagacgggatctcacaatgttgcccaagctggtctggaactcttgggctaaagtgaccttcccacctcagcctcccaaagtgctgggattacaggcatcagccaccctgcctggccatatttttttaggaaacaaaattttcacatatccacaaactgtactcaattcatgttaatattcttggttactcaatataaataaatggaataaaccaataagggagcaatacactgagtaggtgacagctaccattaaaaagggcttgcgttgtaccccataaacatgtacacctactatgtgcccacaaaaattaaaattaaaattaaattttttttttaaaaaggcttgtgggcgggcacggtggctcatgcctgtaatcctagcactttgggagctcaaggcaggcggatagtttgaggtcaggagtttcagaacagcctggccaacatggtgaaaccctatctttactaaaaaaaaaaaaaaaaaaattagctggacatggtggcaggcacctgtaatcccagctactgggtaggctgaggcaggagaatcacttgaacccgaggtggaggttgtagtgagccgagatcgtgccattggactccagcctgggcgacacagtgagacatcatctcaaaaaaaataaacaaataaaaataaatttaaaaggcttgtgtttatgggcttcaatcttctctggatgtccctctgggttagaacaaaaattttttgcaaaatctttactgggaaatggatctggtgaaacctccagggagggcaaacctaggtagatcaatcataaaaaaatttctctcgatcctcactctgtacaaggattgctcccaatcactgcatttcctgcaaggagtgggttttcaagaagagactggaagggaatggccacaaccacatttggtctgggaaatggtgatgttcctcaaagcaagtgccaccagctattctttcatctaacacctactgaatagagatggctatgtgcattccctgccggcccgcccactgcagcgaacaggatgctgcacctgaagggaaacacctagttctgagccatgggggaccaacccatctgtcacaatcatcacaacttgcagctctgccctcaaacctgcccagctcccactctgagttaagagagacttctacaaggatcaagcagaactaaagaactaatgatcaagacccctccagaaatacctccaagctaaagataggcgacatagggccatgttatctctttttttaaagacagagcatcattctgttgcctagactggagcgcagtggcatgactgtggctcactgtagcctcaacctcccaggctcaagccgtcctcccaactcagcctccagagtggctaagaccacaggtgcccgccaccatgcctggctatttttattttttgtagagatgggggtcccattatattgcccaggctggtcttaaactcttgggctcaagtgatcctcctgccttggcctctcaaagtgctgggactacaggcgtgagccactatgcctggtctatttatttctttaattccctttcttactttctcttaagctacacagtgagagctttttcttttttttttttttttttttttgagatggagtctcactctgtccccaggctggagcacagtggcatgatctcagcacactgcaacctccacctcccagttcaagtgattctcctgcctcagcctcccgagtagctgggactacaggcacgcaacactacacccagctaatttttgtatttttagtagagatggggtttcactatgttggtcaggatggttttgatctcttgacctcgtgatccgcccgcttggcctcccaaaatgctgggattatgggcatgaaccaccgcgcctcgccagtgagagctttttcatctcagtgaaaggagtaggacatttttgccaagaagagaacagcaaacacacagattctcttctgagttttaatccacggtccctcgatttctgcctaattcagggagtaattcaactaaaagaaaggcagctgtcaaaagaattgagggcttcttttacctgcacagccaagagcatctggtaaaaatagagcttgcaggtagcttctttcaggcgtttattccccaccactttgtcaaacagctctcccccttccatcctgaaacacaaaggcaaggcaaggggttcattcctgggggaaaacgcacttggacagaagacaataaaacaacaaaacaaattcattaagacaagcaaacagttgacatttttattcacttttgactctcatttttaaaactaataaggtttattcacaatcagatgtcccagttggaaactaaggaatgagatgaaaggattgggcattggaggcacctggggaactttaaaaaatccaattcagtagcttggaagtggggcccaggagttgcttttttttttttttttttgagacagagcctcgctctgtcacccaggttggagtgcagtggtgcgatcttggctcactgcaacctccgcttcccaggttcaagtgattctcatgccttagcctcccaagtagctgggattacaggtatgcaccaccatgcccggctaattgttgtattttttttagtagagacaaggttttgccatgttggccaggttggtctcaaattcctggcctcaagtgatctgcccactttgccctcccaaaagtgctgggattacaggcataagccaccgcacccagtcaggagtttgcatttttatcacacaccacagatgattctgagactgatgtagaagagcaaacagaattttacaaacagacaaccaggatctgaaccctaactctaccatttcccagcttttggactttgggaaagctatttaacctctctcagcttgtttctaccacttaaaaaatggggatgataccatctaccttgatggttgttataaaaattaagagatggctgatgtaggaaaagctcctggcacaggtgcttggcaaggttattcctttatttatttatttattttgagacagagtttcgctcttattgcccaggctggaatgcaatggcgcaatcttggctcaccgcaacctccacctcccaggttcaagcgattctcctgcctcagcctcccaagtagctgggattacaggcattcaccatcatgcccggctaattttgtatttttagtagagatgcggtttctccatgttggtcaggctggtctcgaactcctgacctcaggtgatctgctcccctcggcctctcaaagtgctgggattacaggcgtgagccaccgtgcccggctctgtattatcacttttattaactgtgttaactggattcagtcaggtaacaatctcctatttgatagcagcagatccacaaggggctccaggctctcccagtgctgtgatcaggggtgatcaggggtgtttttaccatagtcttttttcttttttcttatgttttttgagacagtcttgctctgtccatcacggctcactacaacctccgcctcccaggttcaagcgattctccacgcctcagccacccaaggagctgggactacaagcacatgccaccatgcctggctaatttttgtatttttagtagagacggggttttgccatgttggccaggctggtcttgaactcctggcctcaagggatccgcccacctcagcctctcaaagtcctgggattacaggtgtgagccaccacacccagcctgttgtctatacagtcttaatgatcaccctgcatagatacgatttgccaaccaggagcaaagcattctgtgcctgccacaatagctgctcccagaaacacttaatatttatgcaggagcagatatcaagacaggcatcttccagaaatgagacaggaagttattctgattacaccaaataacacaagacattatcgccactgaaataaactaccaagacactgaaagatactcaggtgccaccatgcaacctggtcctggattgaaaggacccgcatagaaagtcctacccaggtagatatttcagagtagagctgtccctcagtatccatggggaattggttccaggagctctctcagagaccaaaatccattatgctcaagccctttatataaaatggcgtaagatttgcatataatctatgtatatcatcccatatactattttttttttttttgaggcagagtctcactcccattgtccaggctggagtgcagtggcacaatctcagctcattacagccttgacttcccaagctcaggtgatcctcccacctcagcctcctaaatcacagggattccaggcacgtgccactatgcccggctaattttgtgtgtgtgtgtctgtgtgtgtgtgtgtgtgtgtgtgtgtgtgtgtgtgttttgtacagatggggtttcaccatattgcccaggctgtatcctgtatactttctttctctatttttttttttttaattttttttgaaacggagtctcgctctgtcacccaggctggaatgcagtggcgcgatctcagctcattgcaagctccgcctcctgggttcacgccattctcctgcctcagcctcccgagtagctgggactacaggagcccaccaccacacccagctaattttttgtatttttagtagagacagggtttcaccgtgttagccaggatggcctcgatctcctgaccttgtgatccgcccgccttggcctccctaagtgctgggattacagatgtgagccactgcgcccggcctttttttttttttttttttaattttttgatatggagtctcactctgtggcccaggctggagtacagtggcacaatctcagctcactgcaacctctgcctcccgggttcaagctattctcctgcttcagcctcctgagtagctgaagtaacaggtgtgcgccaccacactcggctaatttttgtatttttagtagagatggggtttcatcatgttggccaggctggtctcgaactcctgacctcaggtgatccacccacctcggcctcccaaagtgctgggattacaggcgtaagccactgcacctggccctggatactttaaataatctctaaaatacttacaaaacctaatacaatgtaaatgttatgtaaatagtggttctacagtactgtttagaaaataataacaagaaaaatgtttgttcatgtttggtacagatacaaccatccattttatttttctaagtattttcgatctgaggttggttgaatacacggatgtaaaaacccacagttatggtgagccaattataacaatattgccccatggtgagtacacacatgtgccaggtgctctgctgggggatttccatccctcatagcatttaattcatacaaggactctgcatgtgggggttcattataatccccatttaacactatgaagatgagactcagaaaagtgagttaaactgacccatgggtggtcagctagtcaactgcagagtggagttcaagtcctgatcatagatccaggacctggaatcccataccacctatttttggaaacattggagggttttttgggttgatattaaccccctatacacagactttgtgggccccactactacatacatacgttgaggccccccaggatgagaaaggcaagcctacattagattctttggtggctttataaagcatttgaatggaaacagaaatttttaaaaagtttactacttacaattccaaaacaatataataatcttctgcatcaaaaaagtttttaatcttgatgatgcaaggctaagaagagggggagaaaaaagggaaagtagtgagaaactcccaagaggaaaaccacaagagcttagaacatctgcccagagggacagggaggccaagaacaggcatctggccccctgcctcagaggcttggaagttcaatcaggggagaaggcagacagaatctagccaactcctcagtgagaacatgcaagaaattttccaccccaccatgatggtgagagactagttcatatttcatatgcaaggatgctacctgggaatgaaggctaggtctcttcccagtcttcttcctcactaccccagagcagaggtactcaaggacagcctaaggaaccctgagggagactgacaagtagcatgaataaaagctgtcaagtaggagcccagccatgctgccaaacaagggttatttaagctctgggcaactggaacctccaggcaattggaccccatggaacaagatcctaccatttttcaaaggaagaggaaaattctaattttataagaactctaaaacacacttgggtcgggggcagagagagagacagacagacacacacacacacacacacacacacacacacacacacacacctatggctgatagttcatgaccactgatcaatgcagggtgcatggagaacactgagggtaaggaagagaatactgcacattttaaaatgcctatacaatatcatgacttcatacttagcacacctattttttttttaatttttctttcttttttttttattttgagacagtctcattttctttttttgagacagagtctcactttgtcgctcaggcttaagtgcagtggcatgatctcagctcactgcaacctccgcctcccgggttcaagctattctcctgcctcagcctcctgagtagctgggactacaggcgtgcaccaccacacccagctaatttttgtatttttagtagagagagggtttcaccatgttggccaggttcgtcttgaactcctggcctcaagtgatccacccacctcagcctcccaaagtgttgggattacagcagtgagccaccacgcccggtgggcacacctattgtttttacgatacagaagtcagaagacagttaagctcagtgggtaaataaaagatttggtgagtattcatcagggacatacaccccagcacattggaggactgtagttatatcagaattaaaaagaaaagagtcatcagattttttggttttagattcaaaagagtggtaaaacttgccagattgatcttcccataatgtgtatttcatcatattcatcactcatcactctgattaagatcatccaatggaaccttcccacaatgaattgttatatagcaatgaatgaatgcccagttttcccaccatagatgggtcttggaagcataatgctgaatgaaaaagccaagtcagaaaagacttcaaagagtatgatacaagttgagcatcccacatacaaaaatacaaaatctgaatactcccaaaatccaaatcttttttttttttttttttgagacggagtcttgcgctgtcacccaggctggagtgcggtggcgagatctcggctcactgcaagctctgcctcccgggttcacgccattctcctgcctcagcctcccgagtagttgggattatgagtgcctgccactgcacccggctaatttttgtatttttagtagagacttggtttcaccatcttggctgggccagtcttgaactcctgacctcgtgatccacccgcctcagcctcccaaagtgttgggattacaggtgtgagccactgcacccggcccaaaatctttttgagagctgacacaacactcaaaggaaatactcattggagcattttggatttcagatttttggatctggaatattcaaccaggaagtacaatgcaaatgttccaaaatccaaaaagattcaagacccaaaaacctctggtcccaggcgttttggataagggacactcaatctgtatcatttttataagattcagaaacaagcagtaaaactatattatttagggatacacatatatgtggctttaaaaaagcaaggggccgggcgcagtggcacatgcctgtaatcccagcactttaggaggccaaggcaagtggatcacctgaggtcaggagttcgtgaccagcctgactaacatggtgaaaccctgtctctactaaatacaaaaaaattagctgggcgtggtggtgcatgcctgtaatccgagctacttgggaggctgagacaggagaatcgcttgtacctgggaatcgcttgaacccgggaggcagagtttgcagtgagcctaaatcgcgccatggcactctagcctgggcaacaagagtgaaactccgtctcaaaaaactaaactaaactaaactaaaaactaaactaaactaaactaaactaaactaaagcaagggacaggccaggcacagtggctcacgcctgtaatcccagccctttgggaggctgaagcgggcagatcaccaggtcaagagatcaagaccaccctggccaacatggtgaaaccctgtctctactaaaaatacaaaaattatctgaattagctgagtgtggtagcacgaacctgtagtcccagctgctcaggaggctgaggcaggagaaccacctgaacccgggagggagaggttgcactaagccgagatcacaccagtgtgctctagcctggcaacagagcaacactccagctcacacacacacacacacacacacacacacacaaagggacagtacacacagcattcaaggtaatggcattacctctgggtaggatggggaaaacataaacaggtagctcgagtcatgtggtcaggttttttgtgtgttttttgttttgttttgcttttgtttttgagacagggtctcactctgctgcccaggctgaagtgcaatggggtgatcatggctcactgcagtctcaaccttctgggctcaagcaatcctcccacctcagcttcccaaagtgctgggattataggcatgagccaccatgcacggctgtaaaaagtaccttttaaaggagaataaagccaggagcagtggctcacgtctgtaatcccagcactttgggaggccaaggcaggcagatcacctgaggtcaggagttcgagaccagcctggccaacatggcaaaaccccatctctactaaaaatacaaaaattagctgagcctggtggtgggcgcctgtaatcccagctagtcaggaggctgaggcagaatcacttgaaccctggaggcggaggttgcagtaagccgagatcatgccactgcactccagcctgggcaacagacggagactccatctcatacataaataaataaacaaataaaggagaacaaaaagaaaagacacatatagaaaaggaacggagagaaggaaaaagggaactgcttggttctggttggcttcataatgggcagtgccagtacctatctgaaaatgggtggggtctggagctaacagagcatgaagaggtgtccgatagtcagaaccagtgtgaattacttcctctagtgtccgctacctccagggtcactgcctggggctgtcacagctaaaagggtctctctaccaggaatcagaagctactaacccacaccttccacttaggtcatactgggaaagcagttcagggaattaacgatctctgtcactctccaagtgtgttgtctgcactgaaagctttaggagtacgtctcattaaattctcacactgaccttgtgacataagtattcttattgtcttcattgtacagctgaggaaacgggggctccaataaataaaatgaacttctcaaacgacttctcagctgctttgatagtactgagacaggaacccagttctgcctccacactaaagtcacactaaagtgagggaagggaaggacagcaatatctgtgcttaccactgccggggtccacaagacaactggcatgacaagtgttcgaaaagtaatcacatcaatctctgactccaaaggtcaggctctcttggccactagactctacttattgtccccaagcatcaaaatgcactcatgggcccatgtttaattcccaagagtttcttgtgcccttgtaaaatgcaaataaatatgtctagaaatcttttttagggttttgaattcttctctattgcactggacaccggatttgtacaaatgttatgtttgaagatcatctgacatcagagaaaattccctgagcatttgtgtttatcttttttttttttttttttttttgtgagacggagtctcgctctgttgcccaggctggagtgcagtggcacaatctcggctcactgcaagctccgcctcccgggttcacgccattctcctgcctcagcctctccagtagctgggactacacgcacccgccaccacgcccggctaatttttttttgtatttttagtagagacgggatttcaccgtgttagccaggatggtcttgatctcctgacctcatgatccacccgccccggcttcccaaagtgctgggattacaggcgtgagccaccgcgcccaccgcatttgtgtttatcttaagggtaggtctgatgcaaccccaccccagaaaattggagggctcctctctcccagcagggtatggtgtggcacatgcctatagtcccagctactcaggaggctgaggcaggagtatcgcttggtcccaggagtttgaggctgcagtgagctatgattgtgccactacactgaagcctgggtaacagagacagactgtctctaaaaatatgtgtgtgtgtgtgtgtgtgtgtgtgtgtgtgtgtgtgttaaagagagactccaaatctcttggaaaaaggacctggcaaattcagagaggacgaataatttgcaaaagaaacagaagaaagccaagcaggaaggtcagccactcaggttctcataggttttcaggtccactcacagagttctaaaggaacctgctgaagtattgtgtcaacaacagtaattgctcctcagtttctactgacttttttgagggatttggagaggtagaaaaagagagaagaaacctttttgctgtttcgaggttaaaagccagaataaggccaggcgcggtggctcacgcctgtaatcccagcactttgggaggctgaggtggggggatcacgaggtcaggagatagagaccatcctggctaacatggtgaaaccccctctctactaaaaatacaaaaaattagccgggcgtggtggtgtgcccagctactcgggaggctgagacaggagaatggcgtgaacccgggaggtggagcttgcagtgagccgagattgcgccactgtactccagcctgggtgacagagcgagcctccgtctcaaaaaaaaaaaaaaaaaaaaaacaaacaaaaaaaatgccagaataagatcatcattagctggacaggagagagatcttgccttgagtttaatgccattgcctaatgagcttatgccttcatgggcacttatgaattaaggaagaaacgggaaaaaaacaaaaaaaagcaagataagattaagcccaccctctaatttttcttctcactttttaaaagtgagacacatttttcattgagacatagtcatcattgcacaaaaagataagaactaggccacagacaccatttaatcagatataaggacaggatgttgtcatacttaatggatacccttggatttatttggattactccaaataaaaggtattcaaaagtggtaaaacttcaggtataactaaaccaaatttactaaaattaacactgtcttctctaatataaccagttgtgtctatgagatagaataattgctatatgttttggtcaagaactaactcagaagaaatatcatttgtttatttaatcatgaaatctttatacggtattgttcactcagtaacattttggggtaaaactcttcccagctaaatgacagctaggcatgtgtgtgaatgtacacataagttaaagaacccaggttaatattagctttatttattcttttaatttttcttgtttttttttctgagacagtctcactctgtcgcccaggctggagtgcagtggcgcgatcttggctcactgcaatctctgcctcccaggttcaagcacttctcctgcctcagcctcccaagtagttgggattacaggcatgtgccaccatgcccagctaaatttttgtatttttagtagacagggtttcaccatgttggccaggctggtctcaaactcctgacctcaggtgattcacccacctcggcctcccaaagtgctagggttacaggcatcagccaccacacctggccaatattatctttattatactgaaaggctttatactcttctcatattttgagatagataaatctaagtatgagtcatataataatacttacatgatttagctttttcaaaatttctatttctgtttcaacattgagagctgggtcctttgataaacagaataacagagtttattagtaataataattgccaatatttaaaaaaacatttacagttaaactcagttgactcaaggctgcctgagttccaaacccagctctacttatacaaagaaatcaaagcccaggtcaatgacttaaatacctcacctaaaataactttgtaaaatgcttggcaaatagtaagcactcaataaatggccaggccctgtgccaagctctttatttacagagatcatgtctcataagcctcagaatccccatcttacagatggggcaaccaaggctcagaaaacagaagccacttgccctagtctccacagtcagaaacaagtgtgtttccactgtgttcattttaattagtaaaccctacttattagctatggaactatttttattcattaaaatgataaacaaaaaacatgaacaagaaggtgttcaattaaactatataaagaaaatgtgaagtcaaatttctgctaatagagcagatacaggttccaacttcaacagcagcctcgcatatttactgagactctgacaagaggaggcttcagggtactaaagttgttctgttacaattccaaaaggatgaatcaagtaactcagcttcctgggctacaccctccacaagcaaagaggagatagaattacatatttatgtaaaatgaacttcagctaagaaacccagatgtttaattttaagagcctgcctcttcctgtaagccgctaaactcattaccaagtcagggtatactctgataacaggatggtcacaaaggtccaatctgattcaaataatgaaatcaaaacgtaaaattttactcccagtttttaacaatctagttggtattttcttctccccaaaatgggaaacaaatcttagaatcataggggaaaagatctataacaaagtgaacacaaaaaggaaattcctcttgccatgtgagaatggcattgtctagggggaaaaaaaattgatctttaaagaatgtgaaagtataatagccagaaacagctggccactagggaaaatgtgattagaggctgtgttttacattactttgttgagtcacatgtggaaagaccaatgcatttggccatctctcccatacagtaaatgttgattacaaaagagtagtaaaataaatggctgctataaagaaaggctatttcaatgatttaattaaaattttaaaaatctatggctaatccataaaccagggatactcactgccatattacccagaacagcaaagaataagaaattacctaaatgatcagccagagaaatggttaagtaaattacaataaagttgatgacatgaaaactcagtcatcaaaaaggatgtattaggcaaaagtctatgctataatgcatttgtggaaaagcaaaatacaaaactgtatatacaagatgatttcaaccatctaaaaacacgatttcatctgaacaaaatctagaaggaaaaggaaaactgaaaacagctgtggggttacagtggggattatggctgaatttttttctctaatttcctgtcatttattgtaaaaacaatcttgtaacgactttgaacttggaagaagaaaaaaaaaaacttcccactatgctcattattatgtacaattaaatacttttggaaccaaattatctataagtaaaagtttctagattaatcaaagatgccccaaaattttccatgttctttgatactcacaaattcatccatctaagcagggggttattcctgagtttaaaaatcatcaatctaagattattttgggaagttatgaagacgtgttaataaaaggtgatcagccttttattggtacttactgcctctcttgctgaaccaatagcaaacttccttttgctgatgatctttatggctactttcttacatgttttcctctcgaaagccagctttacctctccacaggcaccactagagggaaaaacaaagatagtgattgtctgaatgtttttaattatgagacctaccactcctgggtccacttcaagtattagaatttacagacattccatataacagcctttccattgtccctgtttgcagaggacacagtgaaacttcaccagtgtaaaatgtcaagggcttaacagccaaaaacactaagtcagctccaaattccatttctgagcccagcaatacaaacatgggtcttactgtagccctggattgtgaaattcccagaaagatactaagagaaaaatgagagagaaactacgtatccgagaggtcagaaaaacattaactagaaacagtcctccctggtcaaaaataagtgcccaaaacaaacaaataacggtaaacagaatctgcaaatgaataactttaatggataaatttctttccttcttattctccatcttcaaaggaagtgcataagcagttgatgacataagttgcaccctaaatcaaatcagattacctaagaaaccaaacgtattacacaatcagcctactttcagcaacctctcacagagatttgcagttaaatgggatactactcatggaggaggaatgctctccaagccattacccagaacacagttaatcctgagtaggatctgtcctccaaagcttgggtcagcccaagataatggctactagggcatcaattacccattatgaagtagactattataactattgtgggttttgaaggggtgagttgaggggcttaccaagacatcttttttattgtgttaaatatacataacacaaaatttaccactgtaatcattttaaagtgtacaattcagtagcattaagtacatttgccaatgttctacaaccatcagcatctaattccagaactttctcattagctcaaatggaaaccctgtacctgttaagcaattaagcagtcactcctcactctaccctgtccccagcactcagcccccagcccctggcaaccactaatctactttctctaaatattgatttgcctattctgaatatttcatattgatgtaatcatacaatatgtagcctttcgtgtctggattctttcacttagcgtaatgccataacatttgtggtacttcattcctttttacagctgaataatattccattatatggaagtatcacagtttatctattcaccttccgacggacatttatttggtttgtttccaccttttgtaaatggtttcttcagtatgacaacaaaagcataagcaacaaaagaaaaacaatagataaattatacttcttcattgtgactaaagctgctatgaacatttatgtacaagttttctttttttttttttttgagatggagtctcgctcagtcgcccaggctggagtgcagtggcgtgatctcggctcaccgcaagctccgcctcccgggttcacgccattctgcctcagcctcccgagtagctgggactacaggtacccgccaccacgcccggctaatctttttgtatttttagtagaggggggtttcactgtgttagccaggatggtcttgatctcctgacctcgtgatcctcccatctcggcctcccaaagtgctgggattacaggcgtgagccaccgcactcggccacatgtacaagtttttgtctgaacacttgtttgctttttttttgagatataggctcgatctgtcacccaggctggagtgcagtggcacaatctcggctcactacaacctctgcctcctggcttcaagcaattctcgtgcctcagcctcctgaatagctgggattacaggtgtgtgccacctcgcccaactaatttttgtatttttagtagagacggggtttcaccatgttgggcaggctggtctcgaactcctgacctcaggttatctacccacctcagcctcccaaagtgctgggattagaggcgtgagccaccgtgcccagcctggacacttgttttttaaattggggaatttatatacctagaaggagaatttctgagtcacgtgataattctatgtttacctttttctgttgttgtttgttgttgttgttttttatgccccatagagctcagatgtttacctttttaagaaatcaccaaactattttccacagtggctacatcattttacattcccgttagcagtgcatgggggttccaatttctccacatcctcaccaacagttactagtttctgtttccttattatggtcagcctagtaggtaggtgtgaagtggtatctcattgtggttttgatttgtattgccctaatgactaatgatattcagcatcttttgatgtgctttttggccattgtatgtgttcttgagggaaatgtctattcaagccctttgcccatttgttttgttttgtttttagagacaggatctcactctgtcgcccaggctgcagtgcagtgcctttgcccatttttaaatggcaggttgtttgtttttttattgtacagttctaagatgtctttatctattctagacataagcccttatcagatatagggcttgcaaatatttaatcattctgttggttttgttttcacttattgataggtatcttttgaggcacaaaagtttttaattttgattaagtctaatttatctattttttcttttgttgctgtgcttttggtgtcttatgtaagaaaccactgccaaatacaaggtcatgaagagctgtccctatgctttcctcccagagttgtatagttttacctcttatatttcattcttggttccactttgaattaattcttatgtatggtatgaggtaagggtccatgtaactattctttttaaaatcagctcaaagcactttccaatttcccttctcctggaaacagtcaccctttgcctgggaattcctccccaagtccgtgcagctctagctgggtgtctactatggcacaacccctactcctagaaacacaggatagctacataaccaaaactgagctggagcagtgagccatgatcatgccaccgcactccagcctgagacacagagcaacaccctgtcattcattcatacctacagccagagttgcccttgaaatcaaatgctgacattgggagacagacttctctctgttgtagtttctagacaaagaaaatatcattctgcagcccctggtagccatttttcctaccacatagagagaacaattctataggaagccaacaaacagctgaatcaagagatggagctagagccctggtgacactgcaggagctcttagacgcagtcaaccagaccatcagaactcaaagaccatgaagtaaagcctaatgacctcctagatccagccatgcctgaagtaaggatttgcctgcttatttttatttttatttatttatttatttattttaatattttatttttttgagacagggtcttgctctgtcacccaggctggagtgcagtgatgccatcttggctcactgcaacctccgcctcctgggttcaatcgattctcttgcctcaacctcccaagtagctgggactacagacatatgccaccacacccagttaatgtttatatttttagtagagacagggttttactgtgtcagcccggctggtctcaaactcctgacctcaagtgatccaccagcctcggcctcccaaagtacccggattacaggcgttagccactatgcccggcctggctatttcccagttacaaaagccagtaaattttttctcttacctgactcatttgagttgagtttctatcatttgctacaagttagagaattcatattaaatcttcccttaggaaaacattgaattccatacatttcttcttcttttttttttttttcctcccgagacattgtctcactctatcgcccaggctggaatgcagtggcatgatgatggctcactgcagcctccacctcctgggctcaggtaatcctcccacctccaccttccaagtagctgggactacaggtgcagaccgcaacgctcagctaactttttctattttttctagagacaggatttctctattgcccagctgcccaggctggtcttgaactcctggactcaagtgatacacctgccttagcttcccaaagtgctggggttacaggcatgagccaccatacccagcctcatacatttcttttttcttttttctctttttttttttttttgagacagagtctcactctgttgccaagggtggagtgcagtggcgtgatctcagctcactacaacctccgcctcctgggttcaagctattctcctgcctcagcctcccaagtagctgggattacaggcatgcgtcaccacacctggctaatttttatatttttagtagagacagggtttcaccatgttggccaggctggtctcaaacccccaacctcaggtgatccacccgcctcagcctcccaaagtgctaggattacaggtgtgagccaccgtgcccagcccatacatttcttaagaaagggtttgacggttagattccaagcaaccagtgcaaatatggaaacacatcagttactgaattcagtatcagtaaactaaaatttctcccatataatacagaggatactgtgcttaactatgttgcaggaatatggatgattatttccttttatgtactttccttccatgtttccaaaaatatcagtagaaagacctttgtgagacaggaagggggatgaagaacattttgtaatgtggtaacagtatcctgatactttcctaaagaaatggttctcaaagtatgattggatcaccccaaaaggaccccaagaccttgcagggcatccacaaagccacaactatgctcagaataatactaagacattatttgtgttttccattctcattagctcataagtatggagatttccagacactacgtggcgtgtgacaacataacagactgaatgacgaaacaaattacagaatctagccatcttctaactaagccagatgttaaaaaaattttgcaaaaatgttgaacagtgcctctcttctcactaatctttttaataattattttttataaaaaatgttactcaggccaggcgcggtggctcatgcctataatcccagcactttgggggaccgaggcaggcggatcatgaggtcaggagatcgagaccatcctggctaacacagtaaaaccccatctctattaaaaatacaaaaaattagctgggtgtggtggcacaggcctgtagtcccagctacttgggtgactgagtcagaagaattgcttgaacccgggaggcagaggttgaagtgagctgagatcgtgccactgcactccagcctgggtgacagagcgagactccatctcaagaagaaaaaaataaatgtaactcatcttaacatgtagtaaatttacctaatgaattaatataaaaatgtcttggcaaaatgcagtggttcacacctgtaatcccaacattttgagaggctgaggcaggaggataacttgagcccaggagttcgagacaagcctaggcaatacagcaagactcatctctacagtaaaaaaaaaaataaaaattagggccgggagtggtggctcacgcctataatccagcactctgggaggccgaggcaggcagatcacctgaggtcaggagttcaagaccagccaggccaacatggtgaaacctcatctctactaaaaatacaaaaaaattagctgggtgtgtggtggcgggcacctgtaatcccagctacctgggaggctgaggcaggagaatcacttgaacccaggaggcagaggttgcattgagctgagaccacaccattgcacaccattgcctgggcaacaagagaccacaccattgcctgggcaacaagaacaaaactccatctcaaaaaaataaaataaagtaaaaattagccggctgtgatggtgcaagcctgtagtcccagctactcaggaggctgaggcagaagaatcgcttgaacccgggaggcggaggttgcagtgggccaagatcacgccactgcacctcagtctgagtgacagagtgaaactccgtctcaaagaaaaaaaagttatcaccaataaaattcgtgaggcgaaagagttaatttcacctcaaacacatcaaaaatgcacctatcatgatgtatgaaaaatgctcagtatctctagccatcaaggaaatgcaaattaaaaccacaatgacatcacctgaagcctgttagaatggctattatcaaaaagatgaataataacaaatgttggagaggatgtgaagaaaagagaaccctggtacactgttggtgggaaagtaaattagtacagccattttggaaaatagtataaaggttccccaaaaagctaaaattgtaattaccatatgatccagcaatcccacttctggatatatatccaaaaaaaaatttaaatcagtatgttgaagagatatctgcactcccatgttcatttcagcattattcacaatagccaagatagggaagcaaccaaagtgtccataaatgaatgaacggacaaagtaaatgtggtgtatatatacacaatgaaatactatacacatggccaggcacagtggctcatgcctgtaatcctagcactttgggaggccgagatgggtggattgcttgagcttaggagttcaagaccagcctgggcaacatggtaataccccatctctacacaaaatacaaaaattagccaggcacggtggttcaagcccatagtcccagctacttgggaggctaaggtgggaggatcacttgagccctggaagtggaggttgcagtgagtcaagatcgtaccactgcactccagcctgtgcaacagagcaagactctgacactaacacacacacacacacacacacacacacacacacacacaggaaataaaaaaagaaatatttggctgggcatggtggctcacgctactaatctcagcactttgggaggctaaggcaggaggatgggttgagcccaggagttcaagaccagccctggcaacacagcgcaaccccaactctaaaaaacaaaaacacacattagttgtgcatggtgctgcatgcctgatctcccttgacctgggagatcaaggccacagtgagctctgatcgtgccactaccctccagcctgggtaacagagcaacaccctgtctcacaaagaaataaaataaaaataaattaaaatgactgtgtgaaataacacacaaaaataaaaataaaaaataatacacaaatagataccatacaaatgttatcaatacataatgagtgttataaaatcagaaatgagaaaccaccaatcacaaatgtatagtgaaaaaattaagtgcatttatataagaaaataatttaccttccaagagtttttgacatgatgtattcatctcttaatgccttaggataaactgactgatcatctacagtcagatcaaaaaagacaaaaactaaggaagaaaagagtagaaatgggtttcattaatttattcacaagaggcgatcactgattctaaaatttattcatcatatggaatataagaactgtttttaactacatttaacatgtaaccttaaggaaattagtatgtatgtaatataataggtattagtgggctaatacatattgtaaagcccttgagaaataaatgatagtcaaatttcatgcttcaatggaactataagcatcactctgaaactagtgcaaaaaatccgtaacacaacattatttatattccttgacctcagaatatcaatcaattacactaatataaaatgcccatgcagatttacaacaggcccagaatcaaaaagcaatccatcagtctgagcctagaaaaaatggtctaggcaagtaaatatcccaatgaaaattaggccatcagtatcaccatacgggtattatcatctctcagccatttatacctttatatatccggtattaagtattttatagtgcaaaccatattcaacatatttgtaaagctaggtaaataacattttctaaacaaattcccttttttctccattatttgggctgtatcttaaaaaaagtaattttttttttttttttttgagagagtttcactctgttgcccaggctggagtgcagtggcatgacctcagctcactgcaacctccacctcccaggttcaagcaatttttgtgcctcagcctcctgagtagctgggattacaggcgaacagcaccatgcccggctaagttttgtatttttagtagagacgggattttaccatgttggccaggctgatctcgaactcctgacctcaggtgatccacccaccttggcatcccaaagtgctgggattacaggagttagccaatgtgcccagccaaaaaaaaaaaaagtaaaacaactactttttaaattctataacccaggacagtgctgatgatttaataatttaaccacccacgtgggccaagcctgtgataaattatcaaatatttcaattctacaaagtcatcaatgataaatttgcaattgcctatgccatcttgaaaggtgaaatttgttaagacccttgagtttctcagatctcaggtgacaggttttgacctccctagaataacctaaggatccagtctctggcacaaatctgagccacctgagtatatttcattcaggctggtacacaagaggcaggcacttgtctggtgacagacacctgctggccacccaggcacaagtgtccctctatgcttgtagctattcataacgctgtatgttccagtggcatctgagaatgtagaaatttgattggctctcatgatgtatttctcctgtcaaggtttacttcaagggctcaaacgccattgtccacacaagtcaggaaggtaatgtaacagggtcaggctgtgttgagtttaagacaccatggagaagtggggagagaaaacacacctcccatctaaaggaggcagcctctactcagtgcctacagatcctccggttgtgggactatagactcactgtggccacatattacaacttctctaagacatctggatgttcacattaccactgtaagtatcagtaaatgcctaataaaatatctataggccaaatgcagcctgcagaggaccagtctgacctactttaataagggtcacctttagcctatatgacatctttgttcaaattagagaaaacagagatttattgtacaacatggtgattgtagttaacaacaatgtactgttttttgtttgttgtttgtttgggttttttttttttttttttttttgagacgaagtctcgctcttgtaccccaggctagagtgcaatggtgcaatcttggctcactgcaacctccacctcctggattcaagcaattctcctgcctcagacccctgagtagctgggattacaggcgcctgccatcatgcccggctaatttttgtatttttaatagagacagagtttcaccacgttgaccaggctggtctcgaactcctgacctcaggtgatctgccagcctcggcctcccaaagtgctgggattaaagacgtgagccaccgcgccccgccgtatttttgaaaatcagctgagagagtagattttaagtattttctctattaaaaaaaaaaagataaatatgtgaggtaatgcatgttagctcaaattagtcattctacaatgtatacatatttgaaaacatgttgtacatgataaatacatataatttttttgagacacgttcttactctcttgcccagggaagagtacagtggtgcaatcatggctcactgtagcctcgacctcccaggctcaagcaatcctcccacctcagactcccaagtagctgggactacaggaacacagcagcatgcccagctaatttttttatgtttggcagagatggggtctcactatgttgcccaagctggtctcgaattcctggactcaagcaatcttcctgtcttggcctcccaaagtgctgagattacaggcatgagctaccacgccagcctataatttttatttatctattaaataaattttttaatgtttatttaatttttttaaaagaggaagaaaagtgccctttgagtagaccaatgagaaggtggcacacagcttgtcaaggagaggacagaccaaatttcagcacccagttgcctcctcccctaggtacccacaaacagcaaaacctaaagcagctgccctgactataactgtcagatagaaaacaaaatggtcgccgggcgcggtggctcacgcctgtaatcccagcactttggaaggccgaggcggaaggatcacgaggtcaggagatggagaccatcctggctaacacggtgaaaccccgtctctactaaaaatacaaaaaattagccgggcgcagtggcgggcgcctatagtcccaactacttgggaggctgaggcaggagaatggcgtgaacccaggaggcggagcttgcagtgggccgagatcatgccactgcactccagcctgggcgatagagccagactccgtctcaaaaaaaaaaaaaaaaaaaagaaaagaaaagaaaagaaaacaaaatagtcaaaatagaaacagggaaaactaagttaatcataaaatgtactttaggatgcccaacatagacatagttccaagataccagactgaagactgacttgcatgaaaatcccttaggcatgactttattttgtttggttagatggggtctcaccatgttgcccgagctggagggcagtggctatttacaggcacaatcatagctcactgtagccttaaaatcctgggctcaagggatcctctagcctcacctttctgagtagcagggactacagactcatgccgcagcccctagaggcatgatttttaaaatccctaccagaatctggagaagagtgcttatatgaacctttattttcaaaatgtgtcgcacacacatagacaccctccaagtcattcgactctcagataagtttgggaacgtctatggtttctttaactaaagaaaaattgtattcctcctgtctaatcacgctgagctacttttaactctattggttgtttttgtcaggtatcctttctagatattacccagaaaaacagttgttcattttagatgttattttcatagtttcagaaatggatgcttataaaatgctacctgatgaggctgataaacatctccacttgtgcacgataaccttgtagtatttacaaaggtagaagctctaaagtgagcctcttacagaagcactcacagcctagtacctggcatataaaaagagctcaataggccgggcgcggtggctcacgcctgtaatcccagcactttgggaggccgaggcgggtggatcacgaggtcaggagatcgagaccatcctggctaaaacagtgaaaccccgtctctactaaaaatacaaaaaattaggtgggcgtggtggcgggcgcctgtagtcccagctactggggaggctgaggcaggagaatggcgtgaacccgggaggcggagcttgcagtgagccgagatcgcgccactgcactccagcctgggcgacagagcaaggctccgtcacaaggaaaaaaaaagaaaaaaaaaaaaaaggagctcaataaatgtatacagaaataaatgaatagggctggacatggtggctcccacctgtaatcccagcactttgggaggccaaggcaggcagactgactgcttgagctcagaagtctaagaccagtctggccaacatggtaaaaccccgtctctaccaaaaatacaaaaaattagccaggcgtggtggcatgtgtctgtggtcacagctactcaggaggctaaggtgggaggatcacttgagcctgggaggcagaggttgcagtgccactgaactccagcctgggagacagagtgagaccatgtctcgaaaaagaaagaaagaaaaaaatgaatggaaaaaatgaagaaaggaaagaatgaggtgaagaggaaggaaaaatgaattaatggcctgaaacaacaattcatagatatctaagactgatgtggtataaactgaatcaatcaatgaactataacttattttaatcaccatgataattcaattaacagtatatgggccaggcgggggctcacgcctgtaatcccagcactttgggaggctgaagcaggcagatcacgaggtcaggagttcaagaccagcctggccaacacagtgaaaccccgtctctactaaaagtacaaaaaaattagatgggtgtggtggcaggagcctgtaatcccagctacttgggaggctgaggcaaggagaatcgcttgaaactgggaggcagaggttgcggtgagccgagattgcaccactgcactccagcccaggtgacagtgcaagactccgtctaaaaaaaaacaaaacaaaacaaaacaaaaaaaacagtatatggcattacataaaaccaattaaaccttaaaaccttaaaaatctgtctggatggaactttttcataattttacaatgcaactaggacggcaaagttgaatcttgagtgctaacttactcatctttttttttgttttgagacagagtttcactcttgttgcccaggctagagtgcaatggcacgatcttggctcactgcaacctctgcctcccgggttcaagcgattctcctgcctcagcctcccgaatagctgggattacaggcatgcaccaccatgcccggcttattttgtatttttagtagagacagggtttctccatgtgggtcaggctggtctcgaactcctgacctcaggtgatccatccgcctcagcctcccaaagtgctgggattacaggtgtgagccaccacgcccagcaacttactcatctttactcacttaaaccatattctgtaaggacaggacaaattttcctcctatgagagagtggaaaaaaaaaattccagtaaccataagataataatattacctttatttctgcttagtgacagtgcaatttcagaattgttattcaaaggacggcgttttcctttccctacaagctctgtatttacaaaggttccattgccactgtgatcttctatgtatgcaatgtaagagtttttaggacccacttcctaaaatagagaacattttgtttcagactttgaatagcagagatttatagtgggaaaatatctaaaaacaatgaccaaattaccagctctcctagatacatgggtattcattacctaccctgaaaatccgaaagtgtttcttgctgtatgttcggtatttatctgttcttttcagcagtggttcatcaaagcaatattcacagcttttgtccctcccaaaccagtagttgtcattcacacattctgtaatataaaagcatgcatcagagggctgttgaatttcatgtatcaaacgtttaaaaattgctcataaatgctaattgtaggaaaatagcctaagaaggcaatcagaattatcaatctgcttatcaagattttacaagattaaaaattaggagagaaaaaacaacattaccaatgagtttaacaaatggcagtttatctataaccacatggccaggcacagtggctcacacctgtaatctcagccctttggaaggctaaggcaggaggatcacttgaccccaggagctcatgaccagcctgggcaacatagggggcacccatctctaccaagaatttaaaaattagtctgggcaacatggtgaaaccctatctctacaaaaaataaaaaatcagcagggtgtggtggtgggtccctgtggtctcagctactcaggaggctgaggtgggaggatcgcttgagcccaggaggtcgaggctgcagtgagctgagactgcgccactgcacactagcctgggcgacagagtgagacccagtttcaaaaaaaaaaaaatggccaggtgtggtggctcatgcctgtaatcccagcactttgggaggctgagacgaatggatcacgaggtcaggagttcaagaccagcctggccaagatggtgaaaccctgtctctactaaaaaatacaaaaattagctgggcgtggtggcgggtgcctgtaatcccagttactcgggaagctgaggcagagaattgcttgaacctgggaggtggaggatgcagtgagccaagattgcgccactgcactccagcctggacgacaaagcaagactctgtctgaaaaaaaacaaaaaacaattaaccagatgtggtggtgcatgcctgtagtccagctactcaggaggctgaaggaggaggatcacttgagcaagataagctgatgctacaatgggctgtgatcctgccactgtactccaacctgggcaacagagcaagaccctgtctcaaaaaaataaataaacaaatatttaatatatattatatatttattttatatttattatatataatatatataatttgtatttattatacatgttatataaatttattttataagttgtcttaaatataattatatatttatacacaatataacatatattatatatttataatatagtaattatatctaaatatataataatatataatatatattataatctattaatatatgtatttatatacacaaacacacacatacacatacatatatatataaaaccgtgaaataacaaatagtcattaaaagttctcgagtaatttttaatgacttggaaaattacttgcaatacagtaatttcctgcttattaccttcctgaggttttccatgacacttagcataaaatctgcactcttcctcatggcctactagatgctcagggtctggcgtctgccaccattccagccccacctcatacccctctccccttgctcatgacacccagcaccactggcctcctttcactgcccccaagaatgctgggttcaatctgccttgtggtcttagcacttcttccccaactacacaaatggctcattccaccttgccttttgtataacagatactatctacacaacactatctgcctttaggactctactatcatctcccactcagctttctttctttgagatggagtctcgctctgtcgcccaggctggagtgcggtggcgcgatctcggctcactgcaacctccacctcccaggttcaagcgattctcctgcctcagcctcccgagtggctgggactacaggcacgtgccaccatgcccagctaattttttgtaattttagtagagacggggtttcgccatgttagacaggatggtctcgatctcctgaacttgtgatccgcccgcctcggcctcccaaagtgctgggataacaggcatgcgccaccacacccggcctcccgctcagcttgttatataaacattactcacctgttatcataatgttatcctgttttatatctttttgggtatgggccacggctggaaattaccttgcttatttgtatattttctccccacctccctgcattagaacataacctccaggagggcagctggagacctcttgtttaacagtacaactccagcacttgggatattgcacatggcaggtaattaaatgttcattgcaaggcagactagggaaaatactagcaactcctatcaggaaaaggaataatttccctaataaatgttaggttcctataaatcagtgaaaacgctaaacagtccagtagaaaaataggtaaaggatatgaaaagataatttacaagaaacagaaatacagctggctcaaacatatgaaaggtggccaagctaacccaatataagaaaattcagaaatcaaaaacacattaagatttcatgttttacctattagattggcaaaaatccaaaagtttcatatcaccctgtgctggcaagaggtatgaaaaagcgggtactctcatacattgccattgggaatataatttatacacacattgtctataattgtctagggaggacaatttagcaagatctatcaaaattacatatgggctgggcacgatggctcacacctgtaatcccagtactttgggaggccaaggaaggaggatcacttgagcctgaaggtcgaggctgcactaagctgtggttgcaccactcactccagagtgagagtgagaccctatctctagaaagaaaaagaaaattaacaaatccaaatttagttagttaaaaagatcaacaagttggcaaaccttagacagactgaacaagaaaaaaagagacaagactcaaattactaaaattagaatgagagagataattactactgatctgacagaaataaaaatgatttaaaaagaataattgaacaattgtgtgacagtattagatgacataggtgaaatggacaaactcctagaaagatacaaactaccaaaactaacacaagaagaaacagaaaatctgaatatacccataagaagtgaaaagactgaatgataatcctagcacattgggaggccaaggcaggcggattgcttgacttcaggagattgagaccagcctgtgcaacatggcaaaatcccgtctctactaaaaacaaaacaaaaaaaaatttagccaggtgtggtggcgcgcccctgtagtcccagctactctggaggctgaggcacaagaatcgtttgaacctgtgaggcagaggctgcagtgagccaatattgtgccactgcactccagcctgggtgacagagagagagactctgtctccaaaaaaacaaaacaaaacaaaagactgaatgagtaatcaaaatatccctacaaagaaaagtgcagtcccagattgcctcactttagcttgagcaacatagggacaccccatctctatcaaaataaaaaaattagccacacatggtggcacatgcctgaggtcccagctactcaggaggctgaggtaggagttgagcctgggaggtcaagcctgcagtgaaacgtgatagtgggtaacactccagcgtgggtaagagtgagaccctgtctcaaaaaaaagaaaaaagaaacacacggctggcttcattttaaattctatcaaatatgtaaagaactaataccaattattctcaaacttttcgaagaaattcggaacggaacactgtcaactcatctatgaggccagcataccaaaaccagacagagacatcacagtaaaaccacaaaccaatatcccttgtgaatatagatataaaaatcctcaacaaaacagtagcaaactaaatccagcaacacataaaaaagattacaaatgaccaaacaagaattaacccaggacgccaggcgcggtggctcacatctgtattcccagcactttgggaggccgaggcgggcgatcacgaggtcaggagatggagaccatcctggctaacacggtgaaaccccgtctctactaaaaatacaaaaaattagccgggcgaggtggcgggcgcctgtagtcccagctactcgggaggctgaggcaagagaatggcgtgaaccccagggggcagaccctgcagtgagccgagatcacgccactgcactccagcctgggcgacagcgagactccatctcaaaaaaaaaaaaaaaaaaaaaaaaagaattaacccaggaaagcttggttggtttaacatctgaaaaccaattaatataatacacgataacaatagaatataggaaaatagacacagaaaaaaattttggcaaaatgcaacacccttttataacaaaaaatactcagaaaactaggaataggagtaaactccttcaacctaataaagagcttttattttatttattatctatttatttttaatttagaggcaaagtcttgctctgtggcctgcaatcatagcttgctgcagtctccaactcgtggccttaagcacttctcctgccataggctcccaaagcactgagattatagggtgaaagagtcagagcaaccagccagaaagcattttttttttcttttgagtcagagtctcactctatcaccaactagctggaactacaggctcctgccaccacgcccggctaattttgtttttgtatttttagtagagacggggtttcaccatgttggccaggatggtctcgatctcctgaccttgtgatccgcccacctcagcctcccaaagtgcttggattacaggcatgagccactgcacccaccccagaaagaacttttatgaaacatccacagcttagtcttcagatatcagaggagaaaggagagaggaagagagaagaggagagagaagaggaaagaaaagaggagaggagaggaggggaggggaggaaaggaaagcggaagggaaaggaaaggaaagcggaagggaaaggaaagcagaagggaaaggaaaggaaaggaaaaaagaaaggggaaaggggaaaggaaaaggaaaagggaaagagaaagggaaagggaaagacccacagctaacatcatacttagactgcaaactggccggggatggtgcctcacacctcttatcccagcactttgggaggctgaggcaggaggatcagatgacagcaggagttcaagatcagattgggtaacatggccagactctgtctctacaaaaaataaaaataaaaaagttaggccagccacggtggctcatgcctgtaatcccagcactttgggaggccgaggcgggtggatcacccgagggcaggagttcgagaccagcctggccaacatggtgaaaccccatctctactaaaaatacaaaaattagccaggcatggtggcataagcatgtaatcccagctacttgggaggctgaggcaggagaatcgcttgaaaccgggaggaggaggttgcggtgagccgagatcatgacattgcaatccagcctggtgacagagcaaggctccgtctcaataaataaataaataaaacttaaaatgaataaaggaccttaattaaacataagagctaaaactaggccaggcactgtggcttatgcctgtaatcctaacactttgggaagccaagatggatgtattgcttgagctcaggagtttgagaccagactgcaacatgatgaaaccccatctccaccaagaatacaaaaagttagctgggagtggtggtgcacatctgtggtcccagctactcaggaggctgaagtgggagaattgcttgagcctgggaggcagaggctgaagtgagctgagattgtgccactgcactccagcctggatgacagagtgagatcctgtctcaaaataaacaaacaaacaaacaaacaaaaatttaaaaaaaggaattaaaactgtaaaattttaaaagaaaacataggtataaataattaacaaataataataataaacagcctcggccagacgtggtggctcgcgcctgtaatcccaccactttgggaggccaaggcgggcagatcacctgaggtcaggagtttgaaaccagcctggccaatatgatgacaacccgtccctactaaaaaatacagaacttagccacggtggtgggcacctgtaatcccagctactcaggtggctgaggcaggagaatggcttcaacccaggagattgaggttgcagtgagccaagatcgtaccactgcactccagcctgggtgacagagtgagactccgtctcaaataataataataataataatgataaacagtctctatttattcagcacctactttatgctggtcatcctatcaggatctttgtttacttgtctttttttgtttttcctttttgtggagaatggggtctcgctatattgcccagcaggtctcaaactcctgggttcaagctatcctcccacctctgctgctctaagagctgggattacagttgagagcccctgcacccagcctctttgttttcttacttttaaaggtgatgtatcccatttagccctttctcaccatttctatttctcactcatctaaacctataggcctatctgaaaaaatatattgtattttatttatttgtttattttttggagacggaatctcgctctgtcacccaggcgggactgcagtagcgcaatctcagctcactgcaacctccacctcccaagttccagcaattctcctgtctcagcctcctgtgtgggtgggattacagatgcctgccacaacgccccgcaaatttttttttcttttttttttgagatggagtttcgctcttgttgcccaggctggagtgcaatggcgagatctcggttcactgcaacctctgcctcccaggttcaaccgattctcctgcctcagcctcctgagtagctgggattacaggagcccgccaccatgcccagctaattttgtatttttagtagagacagggtttctccatgttggtcaggctggtctcgaactcccgatctcaggtgatccgcccatctcggcctcccaaagtgctgggattacaggcatgagccaccacgcctggcctaatttttgtatttttaacagagacagggtttccccatgttggccaggatggcctcaaactcctgacctcaggtgatccacctgccttggtctctcaacgtgctgggattacaggcatgagccacaatgcccggtctgaaaaatatattttaaatcagttaaaaatagcttcgagtgtctacttataaatttaaagttgtatatgtggaatgcaggtatattcctccattttttatagttttttcaagatatcaaagttagacatgaaataaaacaaggatggtgagtgacaaaacacaaaatgatacatcagtccttcatttctttatattaacatattctatcctgttaatgccaagttcaaatttgtttattaaagaggtcattgcaatgtaagcgaaaggaaaaaaaacactattttttttggccggagtgcagtggtgcaatcctggctcattgcaacctctgcctcccaggttcaagcaattctcatgtctcatcctcctgagtagctgggattgcagacatgcgccaccacacctggctaatttttgtattttcaggagagacagggttttgccatgttgcccaagctggtttcgaactcctggcctcaagtgatcctcccgctttggcctcccaaagtgctgggattacaggcgtgagccaccatgcctggcaatgttaaaatacacacatgtgtattttaaacatatgcagagcaaaacttactattggaaccaggaggtgtcagaaagggtcaacatgtttaaatcacaaggttggctattttgagacaaaaacaagtaacaagtagtcaacaaatggccatctctattctgaacagctctgattctctgaagctgtggcaaaccacagcagaggttaactagtgaagcttttgtgattaggggataatgtttgcaagtttgagtgaatctgcatttttctaggaagagggtccaaagctaccttcagatctttggatggacagcacattgtaaatgtccaattattatttgttgaaagagtaaatgaacagaatccacagcaggtaacagccagggcaacacccaatactgcctctttggttttaccttttatcacattcaaactccagaattattctaagagtggctcaagcattctgctgcaactaactaaggcaggaaaatagggtctgaaggcagggaatctatggccaattcacgcaaacttcctggaatagatgggcacggttgctcatgcctgtaatcccaacactttgggaggccgaagcaggaggatcacttgaggccaggagttcgagaccagcctggccaacgtggtgaaaccccgtctctactaaaaatacaaaaattagccaggtgtggtggtgtgtgtctgtaatcccagctactcaggaatctgagacaggagaatcgcttgaacccaggagtcagaggctgcagtgagccgagccgagatggcgtcactgcacttgtctgtgcgacagagcaagactccgttgccaaaaaaaaaaaaaaaaaaattcctgaaactaaacaaaaaaggaagaatttgcactctggcctatgatccgtccattctaggaccttcatttgcataaggcgtcaatccacaccagtcttggaatggccgagctccaattcactttggcctctaatgggctgtgagccagcacttcatttacataggatgtaaacagtgggagacctctagagggtacttgaaccccagaagactttgctacaagggctctgcagccacttgctcaggcctgctcccatcctgtgacatgtactttagcttctattgccttccacttcaataaatctatgctttcattgcttgttcatgcatgatgttcaattatttgttcaacgtgccaaaaacctggacaactccaatcagaaccttccacctggtaatacaactttctgtaagtgtttttctgaacaaaacgtgatactatacaacaaagggtcttaccaagattggcaaatccatcctgaagggcccataatcgagcccagggggcaggggtaggctcctcaggttcttggtcctcaggttcttggtcctcaggaatagaatagagttcctgagtggacactgtctctaaggagctcagtgtcccagagctggagtgagaggactggctggagtttggcatcgtgctggtagaggagctggatatgccctgggactgtgaggaggagccttgggactgggtaacgctgccatggggctgtgaacaggcactgctgccatgagactgctgagcctcaacatccgactcccgagacatcacgacctcaaaaagaaagtgtccaacaacaaaggtgagtttcaaggcacaagacttaaaattaaaaagtaaatgatgggcctattacaacagcaaaagaaaagaaaaaaaaaaaaacagggcaaacatgctctccaaaaattaaaagtcctaacagcccagacctatagttcttctgggctgagcttttcaccagatcattgtcaccagatcagttttttatctgacagccataaactacagggaaaaacaaattatctgaaggttacaaataagtaaaaagcaataaaattgagctggggggctcataaaagcttacatttgtccaattcttttaaattaagactgaaaccaaaaatgtactgatacaatcaacactacatttaaatttcatatatacagggggccaggcgcgggggttcactcctgtagtcccgcactttgggaggacaagacgggcagatcatgaggtcaggagttcaagaccagcctggccaacatagtgaaactccgtctctactaaaaatacaaaaaattagccaggcgtggtggcgggcacctgtattctcagctactcgggaggctgaggcaggagaatcgcttgagcccgggaggcagaggttgcagtgaaccaagattgcaccactgcactccagcctgggcaacagtgcaagactccgtttcaaaaaaaaaaactcatatatacagtcctcaatttaacaatgcttctatttaacaatgtttagactttctgtgaaagcaatcagtagacacttacttctccaagtcctcacataaccattctggttttcaccttcagtacagtattcaagtaattacatgagatatttaacaccttattataaaataggccaggtggccaggtgcagtggctcacacctataatcccagaactctggggggtcaaggcaggtagatcacctgagatcaggagttcaagaccagcctggccaacacagtcaaaccccgtgtccactaaaaatacaaaaattagccgggtgtggtggcaggcgcctgtagttccagctactcaggaggctgaagcaggagaattgctcgagcccaggaggcagaggttgcactgagctgagatcgcgccactgcactccagcctgggtgacaggagtgaaaccctgtctcaaaaaaattaattaattaaataaataaaattttaaaataaaataaaataggccaggtgcagtgactcacaactgtaaacccaatatttcgggtggtggaggtaggaggattgcttgagggcaggtgtttgagaccccacctctacaaaaaataataacaataatctttgtgttagataattttgcccaactgtaccctgacataagtgttctgagcatgtttaaaggaggctaggctaaactatgacgtttggtatcttaggtgtattaaatgtaatttcaatttaacaatattttcaacttagaatggttttatttagacataatgccattgaaagttgaggagcatctgtgtactttggaaagcaaaagaagacaaaaaatcaggtggcttgatataaaagtcaaaaagaaattgtacaataacctgctgcattactccaaagggtccatttacataaaatgtcactggtaccccttttcccccaggcttgctcctaaagtgaaacacacctgttcgttcaatctatattccctgacacctaaggacccagtgacttaatgaggcagaacacaaaggaagacagctcttaacaactccacctatccctttgtgatgctaaataaccatagggcttatcttttcagcatcctaaatggccttccggccttgatgtaatcttgcaggaaccattcttttataaactggagaccgtaacagaggcttccacccttgtcttagaattaacctgatagacagttagactgtcataacaggctgggtgcagtggctcatacctgtaatcccagcactttgggaggccaaggcaagaggaccacttgaggccacgagttcaataccagcctggccaacatagtgggaccccccccgccccccgtacaaaaaataagaaaattagacatgatggcatgcagctgtgggctcagctactcaggaaggtgaggtgggaggatcacttgagcccaggagttgaaggctgcagtgagctatgatcataccacttacataccagcctgggtggcagagtgagaccctatctccaaagaacagaaaacaaaccaagactctgataacagaaccaccagtaaaatcaaagtaacatccactgctgacctaatcggattaacaaaaaaaagggagggagaggagggcattctcttcctccccaaactcaggctactactctaggagaacataggaaacaacactatagtagtccccaccatcagagggggataagatccaagaccccccagtggatgcctgaaacctcgcatagtacagaaccctatataaattatgcacaactttctttttccttcttcacaatttcacaaatagaagattagttcttaccatagacgttagcagcctcagcatacaaatttttttatttccatattaaattgagatctttcaccttttcagtaaaaggaaacactttacagcttctctttacaatatccaaattgccagcatcttttgctttggggccattattaaatataagggtgacatgaacacaagcactgcaaaaccatgtaatttaagacttatgaactgattatttctttttttttttttttttgaaacggagtctcagtcacccaggctggagtgcagtggcacaattttggctcattgcaacctccacctcctgggttcaagcaattctcctgcttcagccttccaagtagttgggattacaggcgcacaccaccatgcccggctaatttgtatattttttttagtagagacagggttttcaccgtattggccagcctggtctcaaactgcagacctcaggtgatcctcaggtccacctcagcctcccaaactgctaggattacaggcctgagccaccatgcccagccatgaattgactatttcttatgaattttccacttaatagtttcagatcgcagctgaccattggtaagtgaaactactaccgctgataaggagggactaagatacccacactgattgtatttacacagctttcaagatacaaaggttctgccaggtgtggtggttcatgtctgtaatcccagcactttgggaggccaacgcaggtagattgcttgagcccaggaattcaagaccagcctgggcaccatggtgaaatccagtatctacagaaaatacaaaaaattagcagggcatggtggtgtgcacctgtagtcccagctacttgggaagctgaggtgggaggatcacttgagtccaggaggttgaggctgcagtgagccgtgatcgagcctgcactccagcctgggtgacagagcgagaccctgtctcaaggaaaataaaaaagatacaaaggttctgatgagttttctttaaaacataccaggaaggcaatgccaaaactgagtatgccacaccagggactgctggtctaatactacctgagccaggctgagtcttccccacagctttttaagcaagacaggacaactggagaaaatgtgtcaacaagttactatgagagattagaggcaagcggatctggagtcagacacttgagtgaaactgtgcatgactttaggtagatcacaacttctctaaacctgttttctcatctgaaaataagtagacagaccatgaggattaagtgaagtgacgcatgtaatactccccccacccacccatgcttgctatctgggagctattgctattggaaagccatgcagagaagtgagtgaaaaaccaaagtgagggcagcaaaactccaggactgtagacagaaatccagtcccaaaacctataaaactactagaagaaaacactggggaagtgctccaggacactcatcttgggcacaggttttttgggcacagggtttttacgtaagacctcaaaagcacaggcaactaaagcaaaaacagacaactgggatttcatcaagctaaaaagcttctgcacagccaaggaaacaatcaacaaagtgaagagacaacccacagaatgggaaaaaacatttccaaactagccatctgacaagggatgaataaccagaatatataaggagatgaaactcaactgcagaaagacaaataatccaatttaagaaatgggcaagccaggcacggtgcctcacatctgtaatcccagcactttgggaggccaaggtgggtgaatcatctgaggtcaggagttcaagaccagcctggtcaacatggcaaaaccacatctctactaaaaatacaaaaaattagctgggcatggtggcccgtgcctgtaatcccagctacttggtaggctgagacacgagaatcacttgaactcaggagacggagacggaggttgcagtgagccgagatcgcaccactgcactcgaggctaggtgacagagtgagattctgtctcaaaaaaaagaaatgggcaaaagatccgaaaagacatttctcgaaagaagacatacaaatggccaacaggtatattaaaaaaatgctcaacatcactgatcactggagaaatataaatcaaaactacagtgaggcccgggtgcagtggctcatgcctgtaatcccagcactttgggaggcggaggcgggcagatcacttggggtcaggagtttgagaccagcctggccaacatggtgaaacctgtctccactaaaaatatgaaaattagctgggcatggtggcaggcgtctataatcccagctacttgggaggctgaggcaggagaatctcttgaacccgggaggcagaggaggcagtgagccaaaatcgcgccactgcattccagcctgggcgacagagtaagactctgtctcaaacaaacaaacaaacaaaaaaacccacaatgagataccatctcacccaagttaaaatggtttgtataaaagataggcaaaacagatgctggaaagaatgtgcagaaaggggaactgtatagagtgctcttgacataagtaattttatcttagaaaaaggctctatcttatattttaaaaggcattatgccaacagggaccagatgtttgtctaattaataaagactgtactggccatgtacagtggctcacgcctgtaatctcagcactttgggaggccaaggcgggcggatcacaaggtcaggagatggagaccatcctggtcgacatggtgaaaccccaactctactaaaaatacgaaacttagctgggcatggtggcgcgtgcctgtagtcccagctactcgggaggctgaggcaggcgaatcgcttgaaccagggagtcggaggttgcagtgagccgagatcgcaccactgcactccagcctggtgacaaagcgagactctgtctcaaaaaaaacactgtactaaaccagataaggatataaatatgtacacgcttttgttattagtcctcacaagaaaattctttggtcataagagcaggactttattaggtcaaaatggctgtcctaacagacaccatcttgctgtcactcatgattaacacccagtatccgccatcaaaggctctgcccgcatcaaaaactcttccttacaagacactgacaccccagataaagccaaaacactctctttgtccacattgctctccttggactggtttgataaccactttccctatccccttttctccgaatgttaaatgttactttaatgtaagatttttaatctataacatttacatattaaataaatatactattgtgtacggtttacaatactgactgacttgtggaatggcttgagcctgtgtgcccatggctctgaccaccaagtaaacagggagtactacggaaaattgcttccttgggaactccatatagctcgtggcttttacaattaaaataaaacatcaataagtctgatcttgtggaaagacacaaatgtgcatggacctggttatgtctgaccttgcactgttcacatacaccactggtgggaatgcaaattagtatagccactatagagaagagtattgtgattcctcaaaaaattgaaaataggccgggcgcggtggctcacacctgtaatcccagcactttgggaggccaaggcaggtggatcacctgaggtcaggagttcgggatcagcctggccaacatggtgaaacctcgtctctactaaaaatactagccgggcatggtggcgggtacctataatcccagatacttaggaggctgaggcaggagaatcgcttgaacccaggaggcagaagttgcagtgagcccagatcgcgccactgcactccagcctggcaacagagagagactccgtctcaaaaaaaaaaaaaaaaaaaaaaaaggtacagatggtaatcatatatgtatactttatatcaaaaataaataattttttttaaaaattccagaggtctttcaagtgaaacacaatatttttttcaagcagaaaacctaagtccgaaggaggactgatgccctcctacccacttctggccaccctatcccatacatttacttagggacttatttagggacacgcagaacatcctcctacacagctcagtgcgtttccagtccctgcagcgcccagtagctaagactggcttctctataagtattttatagattgaacctaaagaatggcaacgatttctaacatctatagaatttttacgaagtcacttcgctctgatattgaagaatacaacgctgttcttcttatcctgtatgttcaggcctgtttcagcttgcaagtaatacgggaagtgaacttcacctcgaggatgatctactgaaaaggaagagagtcgcccacacactcccccttcagctcaaaactacagacaaagcgaagctcaggagactccgttcgcacaaaacgcttaagatgggattcgaaccaccaaacacccaacagaagttccccatatgactcaccgcgtgagcccacctggagccgcacactctccgcagcctcagccagcagagtggcgctaaacctgc

SEQ ID NO: 36 - DNA, 37167 bp, Homo sapiens
  source 1..37167: mol_type = genomic DNA; note = HGNC Approved Gene Symbol: RAD51; note = Cytogenetic location: 15q15.1; note = Genomic coordinates (GRCh38): 15:40,694,733-40,732,340
aattctgaaagccgctggcggaccgcgcgcagcggccagagaccgagccctaaggagagtgcggcgcttcccgaggcgtgcagctgggaactgcaactcatctgggttgtgcgcagaaggctggggcaagcgagtagagaagtggagcgtaagccaggggcgttgggggccgtgcgggtcgggcgcgtgccacgcccgcggggtgaagtcggagcgcggggcctgctggagagaggagcgctgcggaccgaggtgagtgtgtgaggcgcaggctgggccctccagagccgcggctcgtcctcgcccacctgcgtcctggccggtccagtgctcagcggcagttggggcctccgcgcgcagtgtgaaacccggacgtggcagggcgtgtccgcgcccgaccgaccctcagctgctggggcgaaaacacaagtggacctcagtctttagaactaggggagaaacattagagcctttataggcaacacctattttatgggttcgagcgagaagtccgagatcagagcggtgtagccacagctgtttaatatcacagccagggcttccggattcctgatctgtctttccattacaccgtgcttagaaagtaccaatctccgattgccaaaacagtgttttcatcatctaatgcggaaaaccattcacatgatgcctagagaatgatctgaagtgaggtttggttttcttaaaactttttttttgagatggagtctcgctcttccgcccaggctggagtgtagtggcgcgatctcggctcactgcaacctccgcctcccggattcaagcgattctcctacctcagcctcccgaggagctgggattacaggcccccaccaccacgccgccaggctgatttttgtatttttagtagagacggggtttcaccatgttggtcaggctggtctcgaacttctgacctcaggttatccacccgcctctgcctcccaaagtgctgggattacagccgtgagccacagcgcctggcccctgtttttttgtttgtttgtttgtttttaacttctaaagcgcaatgtaatatacatgtagaaaaattcacattcacaactgtatacaactccgtgaattattacaaaatatactggccgggcgtcgtgtctcacgtctgtagtcccagcactttgggaagtggaggcgggaggacgattgagcccaagagttcgagaacagcctggtcaagatagtgagacccgcatctctacaaataggaaaaattagctaggcatggtggcgtgcacctgtaggcccagctattcaggaggctgagaagggaggatctagcctgggaggtataagctgcagtgagctgtgatcaggccactgcactccaacctgggcgatagagcaagacaaaatgaatatacacctatgtaatcaccacttaatagaatggtcctcagaagccttcctgtgtagtatttaatattttcccctttttacagtggtaactgctatactggtttctaatgagatgaactaatgttgcttgtttttgaattttatataaaaatacatcaggagtgttgagtgtttcgttgtttcacatgcttgccaacacgatatttttcagcctttttgattttaactattctgctggttacacagtaatgtcttaatgtgattttaattttcctgattaataatgatgttggacatctgttcatatgtttttgcccattttgatatcttctgtgatgtgcttgttcaaatctcttgcctatttttctattatctttttcttactgatgtgaagttctttatatactggttatcagccctcagttatgtttgtgctaaatgttttctctactgtggtttgacttgtcactctcttagtggtgtcctttgatgaatagaagtgctgaatttatttttttattatttatttatttatttatttttccttttgagacagagtttggctcttgttgcccaggctggagtgcaatggcacaatcttggctcaccgcaacctccgcctcccgggttcaagcgattctcctgcctcagcctcccgagtagctgggattacaggcatgtgccaccacgcccagctaattttgtatttttctttaatagagacaggatttctccatgttggtcaggctggtcttgaactcctgaacttaggtgatctgcccgccttggcctcccaaagtgctgggattgcagacgtgagccacagtgcccagtagaagtgctgaatttaaatgtagttcagttttcagtcttttcctttttggctagtgcgttatgcatccagtttcaagaaatctttttctgtcccaaggttgtgaaaataataagtgttactttgtttttgacagacgattgtacatatttatgagatacaagatgatatttctttttttttttttttttttttgagacggagtctcactctgtcgcccaggctggagtgcagtggcgcgatcttggctcactgcaagctccgcctcctgggttcacgccattctcctgtctcagcctgccaccacgcccagctaattttttgtattttttagtagagacagggtttcaccatgttagccaggatggtctcgatctcctgacctggtgatccacccgccttggcctcccaaagtgctgggattacaggcgtgagccactccacctggcccaagatgatatttcaatacatatatacattgtataatgaatgatcaaatcagggtaatcagcatatccatcagttcacttaaacacttgtcatttctctttgtgatgagaacattcaaaatactcgcttctggctattttgaagtatacattacattagtgtttactgtagtcaccctactgtgaaatagaaccctagaacttattcctcctatctaactgaaactttgtgcctgttgaccaacctctctccttcctgccgccccctgcaacagctgcattctcctcagtctctggttaccactgttctatttgttccttgtatgagatgaacttttttttttttgtttttttttttgagacacagtctcactctgtcatgaggctggagtacagtggcacgatctcggctcactgcgatctctgtcttccgggttgaagccatttacctgcctcagcctcccgagtagctgggactacaggcgtgtgccaccacaccctgctaatatttgtatttttagtagggacggggtttcgcatgttggccgggatggtcttgatctcctgacctggtgatctgcccgcctcggcctcccaaagtgctgggatcacaggcatgagccaccgcgccccgccaagatcaacttttttagattctacatatgagtgagatcatgcagtatttgtctgcaaacacatttataatgtataatggggtatataaaaataagtaaaacttggcccctacactgaaggaatataaagcaggagaacagagaggcacaataagagaatggccttggcttttcctaaagtctttttgatacgactagctagatagaagatggggagagagatgcaccttatttctctagtgtttatactgataagcatttgtatttttcagtaatggcaatgcagatgcagcttgaagcaaatgcagatacttcagtggaagaagaaagctttggcccacaacccatttcacggttagaggtatgtggttagttgctaattttggaattatatactagattcttctacctagtggaaggtattacaacctttacataaaatataggtttactaccaaggtcaagacccaaattagacttttcagaagtgttgtcaataatcctgtggaaaggctgcagatcattgctaaatatgtctggcagggcctcttcctttgtcaacaattctcttcctactttatcatttttatttctgagagttggactgtcagaaactaaggcctaggatcccatggtggaatctctgtgctgtttttgtttgtttgtttgtttgtttttgatggagtttcgctcttgttgcccaggctggagtgcaatggcgtgatctcggctcaccgcaacctctgcgtcccaggttcaagcgattctcctgcctcagcctcccaagtagctggaattacaggcatgagccaccacacccagctaattttatatttttagtagagacagggtttctccatgttggtcaggctagtctcgaactcctgacctcaggtgatccaccctctttggcctcccaaagtgctgggattacaggcatgggccactgcgcccagcctgtgctgtttttttgtttgttttttaagaaatgggtcttaactgtgttgaccatgttgatcttgaactcctggcctcaagcagtccacctgccttggcgtcccaaactgctaggattacaggcatgagccaccatgcctggccaaagcatcctgtgctatttgcactaagtatgaaagtgctgttctgggaattatagcggcctggaccagttatgcaaggaagacagggaagcaccttctctccattaacctagatttgtgctgtcagctgtcattggcagagagaagggtgtggtggtgttatggtataagagacaagctccaattcaggattctgcacaagaacattaagcaccagagctgaggccttacactatttctgcccattgtatagagactgccctgtgagtgcagctgatttgggctaagtaggaggaaagcagagaaagacttgattcttctgtctctttttttcatatttcccatctctgactaatcttcaagactctagaagttaggagtgcaaaaggctaataaaaaaaaaagactctagaagttacttaaatggatttgtgataaacatttgaaagttcagagtcataacttctggtgccatgagcatccttatactcaaacatgcatattgcttaaatattaatagcagacatggcttatgttggcaaactaatctctcccctcttctaaattctcccaacccctgaatgcacccacattcacctactaactcatgttttcccagaagtcatggttttggtggctaatgaaaccaaagctgacttgaatataggaagaaagaggtgtctttgggtggtttgttttgagaagaggtataaaagtccctgacaaaaagtagttttcctcactgttaatgtcagttgttagagcagagctttctggtcattgttcaacaaaaagtattgacaggccaagatagtgctctttatattctgagcagccttatctatttaccctaccatagtgtaaaaatacagttttttatgtgtgcttgatgtggaaagtgttgagcaacactgtcttaaagtggtcttgtagggcccaaggtctcagagatcatttagggtcacaaaaaaaggttgggagttactttttaattccaattgctaataggagttctttttaatgtacatggcttagtgctagtttaaaattattgattttgataatgaaaaggttgttaatttgttattaagtacctcatatatagggctcatttttcagcttttgcatataataacagtaggctctctgtatctccggattctgtatcagcaaattcaacaaactacgtatcaaaaattcaatcaactacatatcaaaaaaaagtatacaggaggatgtacataggttatatgcaggtaatacgccattttatataagggacttgagcattgttggattttgttatctgctgggggtcctggaaccaacttcccatctccccccgcccccccaaggatttcaagggacagttgtattacaagtcttcaagcacctctgtgaagtatgtaggacacataacatctgtgttagattagagaactaaagcttaaatttatccatggttttcttcatttgcagcagtgtggcataaatgccaacgatgtgaagaaattggaagaagctggattccatactgtggaggctgttgcctatgcgccaaagaaggagctaataaatattaagggaattagtgaagccaaagctgataaaattctggtaagtactgcttacttaacctagggaggcattagtgggaatagtacaaaagggaatgtagtgaaagacttcttccttctatctcttattcttcggtcatctcattatcctttccaggggtgactgttacctgtttcttttcttcttttcttttcttttcttttttttttctttctttttttttttttttggagacgggttctcgctctgtcacacagggtggagtgcagtggtgccatctcagctcactgcaaccttcacctcccaagctcaagcgatcctctcacctcagcctcccaagtagctgggactacactacaggcacatgccaccatgccggggtagtctcgaactcctgagctcaggcgattcacctacctcagcctcccaaagtgctggattataggtgtgagctactgtgcctggcctatttatttttctagcttcatatagttctttaacatacatacttccccatggttacattttgttttatgaacctatttcttcagtgtttatatagttacacagttttattgcctttacccttgaagttttatgtagtataaagcagattttttttttttttttttttttttttgagacggagtctcgctctgttgccaggctggagtgcaatagcgtgatcttggtctactgcaccctccgcctctcaggttcaagtgattctcctgcctcagcctcccgagtagttgggactacaggtatgtgccaccacacccagctaatttttgtatttttattagagacagggtttcaccacgttggccaggatggtctcgatctcctgaccttgtgatctgcccacctcagcctcctaaagtgctgggattacaggtgtgagccaccgcgccccaccgcaaatatttatttataaaattgtattttcacgtatcgattactgttagcgttagataaatttattggattactcaaatgaatatttgctgaagtggttgcttaattggaaataagggttctgagtccctaacagtatttttgttaaaagattgtcatattgactaagccagtaggggtccctaaagtctttctgttttcgctttttgggtatcagtttttgtgaatgaacaaatgctgacaggatcttttctttttgccttgcgagatcttggtttcagaaatcaagtcacttctctgtttctatgaacacaacaatgcaaacctagaatacatgatttgagatgcaatatggtatagacttacgtgtctttacttttcaatattttatgttctttgtttctggccagtaaagattatgattgtattgtttgttttctgtttttttttgaggcagagtgtcgctgtgtcacccaggctggagcacaatggtgcaattttggctctgctcactgcaacctctgccttccgggttcaagtgattgtcgtgcctcagcctcccaagtagctgggattacaggctcccaccaccacacgtggctaatttttgtattttcagttgagacggggtttcaccatgttgcccaggctggtctcaaactcctggcctcaagcaatctgcccacctcagcctcccaaagtgctgaaattacaggcactagccactgtgcccaccttttttttttttttttaaagaaaaaaaagaaaagtctcactctgttgcccaggctggagtgcagtggcatgatcaaagctcactgcagcttcagcttcaaactcctgggctcaaggaattctcagcctgctgagtagctgggactataggcacatgccactagcctgaccatttctaccagttttgtctttgctaatacattctcctgtttttcaccaaaggaagtagtctatattccttgagctcccatggcttgttagtacttctcatattacccatcacatctacttgtactatagttattttgtatagtttatctttctgattaagttataagctctgtggaggcaggaatcagctcttctttttctccatatccttcagagtccctgggactatgtttcatacgaagtaagtgtctagtacatgtttgttgcactgaaatgacagtgagtatatgaattggccaggctggtctcaaaatcctggcctcaggtaatccgcccatctcagtatcccaaagtgctgggattacaggcgtgagccactgcacctggccgtgcaatgaatttttaaatgaaatattaagtatatagaaaagtttagagaataaactttcattgatttttcagctatttgttgattttttttcttcatgggaaatttaaacattatgaaagtttaatctttttactttctatgggtctatttagattttcttcttgagtgagttttggtagtttatctttctaagaatttgcttatttcatctaagttacctaacttgttgacatagagatgctcacagggtttccttatactactttttatttacataaagtcagtagtaatgtcccctctttcattcttgattttagtaatttgagtcttttctctttttttctcgggcaatgcagctaaaagtttgtcaattttgttgatattttcaaagaaccagcttttggtttcattgatttttctctattattctgccctctacttaatagtttctaccctaacctgtattatttccatctttctgcttgctttgttttgtttgcttttctttggaaggttaggttatgatttatcttttttatttttagaggcagagtcttgttctgtcacttacgttggagtgcagtggtgtgatcatagctcactgcagcctccaactcctggctcaaacaaaccttctgcctcagcctcccaggtaactaggaccacaggcacgccccaccatgccctgctatttattttattttattttatttttgagacggagtctccctctgtgcccaggctggagtgcagtggcgtgatctctgctcactgcaacctctgcctcttgggttcaagcgattctcctgcctcagcctcctgagtggctgggattacaggcacgtgccgccatgcccagctaatttttagtagagacagggtttcaccgtgttagccaggatggtcttgatctcctgacctcatgatctgcctgcctcagcctcccaaagtgctgggattacagtcgtgagccaccgcgccaggccttttttttttttttttctgatgcagtctcactctcttgcccaggctggagtgcggtggtgtgatctcggctcactgcaacctccgccgcccgggttcaagcagttctcctgtttcagcctcctgagtagttgggactacaggcgcacgccaccacgcccagctattttttgtatttttagtagaaatggggtttcaccatattgggcaggctggtcttgaactcctgacttcgtgatctgcccacctcaccctaccaaagtgctgggattcaggcatgagccaccatgcccagccatgccctactaatttttttttttttttttgagatggaatctcgctgtgtctctcaggctggagtgcagtggtgcaaattcagctcactgcaacctccgcctcccagattcaagtgattcttccacctcagcctcccgagtagctgggactacaggcgcgtgccaccacgcccggctaatttttgtatttttagtagagaggaagtttcaccatgttggtcaggctggtcttgaactcctgaccttgtgatctgcccacctcagcctcccaaagttctgagattacagaggtgagccaccacacccagccaccctgctaattttaaaacatttttagagccagggtgctgctttgttactcaggctggtctcaaactcctggcttccagcagtcctcccacctcagcctcccaaagtgctgggattacaggtgtgattcaccacacccagccttcttttctaatatagctgtttatagctatgaatttctctctaagcactgcttttcttggagcccatacgttttggtatatcttcgttttcattcattgcaaaaacattttctgatttcccttgtcatttcttctttgacttgttgcttatttaggagtgtgttgctttatttttgcatatttgtgaatgcacttacttttcaattttagaatcaacccatagtgctattacagaacacttatctgtaattacaaaatagaatgtgaatgttctcagccagacaatatgaaagaaaaggtacagctgatagaggtggggaagtagccatggagagagaaaagattgaagggcaaatgtcctcatttttacaaagtaggaagttaagggatacagtctgcggttgatggagcaggaaatgaaggtgtactgtattgtcatttttgtcataaattgggcaaaacacatatgtacggatctctaatagttttttgttttgttttgttttgttttttgagacagagtctcgctctgtcccccaggctggagtacagtggcgcgatctcggctcactgcaagctccgcctcccgggttcacgcctttctcctgcctcagcctaccaagtagctgggacttcaggcacccgccaccacgcccgactaattttttgtatttttttagtagagatggggtttcaccatgttagccaggatggtctcgatctcctgacgttgtgatccgcctgccttggccttccaaagtgctgggattacaggcgtgagccatcgcacccggccggatctataatagtttttaaaactatattaatatattaacttgaattggcaatttaaaaattgatcttcatggaatctctgaattagattatccttttttatgactttctaaagagaaatcatcctggtaattttatttgatattttctcttcccattgcacaccttgttttactaatatttcttttttctttatatatatttttttgccatcaagatcactgtggtaaggaatattattttgttgatttaatatttcttatttttcccaggctgaggcagctaaattagttccaatgggtttcaccactgcaactgaattccaccaaaggcggtcagagatcatacagattactactggctccaaagagcttgacaaactacttcaaggtgtagtaatcctttatcctgtgttgtgaactctagttaggaaagcttccaggttataaaacaaaactgaaatatttgtgtagcatttccttgttagataatgataaagagatagaggaaggccaggtgcagtggcttatgcctgtaatctcagcactttgggaggctgaggtgggcagatcacctgaggctgggagttcgagaccagcccagccaacatggagaaacctattaaaaatacaaaattagttgggcatggtggcacatgcctgtaatccctgtaggtgcacatgcctactcgggaggcagaggcaggagaatcacttgaacccggaagacggaggttgctgtgagccaagattgtgccactgcactccagcctgggtgacgagcaaaactctgtctcaaaaacaaagagagataaaggaagtatccacattgaagaggtaagactgctgcaaggtaggaccttatttataaaatactaaacttatctgcaaattaaataatttagtctccatttaatattgtgttaagagagtaagctccttttgcttaaggaggtaactgtaattataacctactctaccacagggttgaaaacctgatgactggttaaaacattccatgtttgaatactactcattgtgtacacactaatcttcaggacttcagggaaaactataaagcttttgaccttattatttatttttcgagacagggtctcactctgtcacccaggctggagtgcagtggcatggtctcagctcactgcaacctctgcttcctgggctcaagtgatcttctagcctcagtctccccaagctaggactatgatcatttaccacctggctaattttttttttttttttttttttttttgagtcggggcatcactcattatgttgcccaggctggtctcaaaatcctgagctcaagccatcctcctgcctcagcctcccaaagtgctgggattataggcttgagccaccttgcctggcccaatgtcagttttctttcccttttttttgagacagagtctcactctgttacccaggctggagtgcagtggcataatctcagctcactgcaacctccgcctcctgggttcaagtgattctcctgcctcagcctcccaagtagctgggactacaggcaagtgccaccatgcccagctaatttttgtatttttagtagagatgaggtttcaccacgttggctaggttggtctcgaactcctgacctcagatgatctacccgcctcagcctcccaaagtgctgggcttacaggcgtgagccatcatgcctggcccccaatgtcagttttctaatatcagtgctatactatcattatgcaagaggttaacactgcagaaggctaggtgcatagaaatttcgtatgtttttttttgttgttgttggtttgtttgtttgttttttaaagacagagtcttgctctgttgcccaggctagaatgcagtggcacaatctcggctcattgcaaccactgactcccaggtttgagcagttctcctgcctcagtctcctgagtagctgcaatgacaggcacccgccaccgtgcctggctaatttttgtatttttagtagagacgggatttcaccgtcttggccaggctggtctcaaagtcctgacctcctgatccatccacctcggcctcccaaagtgctgggattacaggcatgagccactgtgcccagcttttttttttttttttttttttgagatggggtcttgctatgtcaccccggctggagtgcagtggcatgatcttggctcactgccacttccgcccccaggttcaagctattcttctgcctccgcctcccgagtagctgggactacaggcatgcaccaccatgcccagctaatttttgtatttttagtagagacagggtttcaccatattgtgcccagcttttttttttttttttttgaggagtctcactttgtcacccaggctggagtgcagtggcgtgatctcggcttgctgcagcctccgcctcccaggttcaagtgattctcctgcttcagcctgctagtagctgggattacaggtgcccatcaccagttccagctaagttttgtatttttagtagacatgaggtttcaccatgttggccaggctggtctcgagctcctgacctcaggtgatcagcccgcctcggccccctaaagtgctgggattacaggtgtgagccaccgcacctggccttatttgcagctatctataaatctaattatttcaaaatacttttggtttatttgtttgtttgtttgtttgttttgaaacagggtctcactgtgtcacccaggctagagtgcactggcacgattttggctcactgcaacttctgcctcccaggctcaagtgatcctctcaccttagctcctgagtagctggtactacaggcatccgccaccatgcccggctaatttttgtagagacagggcttcaccatgttgcccaggctggtctcgaactcctgaactcaagcaatccacccacctaagcttcctaaagtgctgggattacaggcatgagccaccacggctagcctcaaaatacatttgtgaaaaattatcgcttgttggaaattgaatttttaacttacataaacatctttctgatgagctccaagaacatttctatgactacagtttctacatgtttgtattatgctaagagttatttcttatcgcttttttaggtggaattgagactggatctatcacagaaatgtttggagaattccgaactgggaagacccagatctgtcatacgctagctgtcacctgccaggtgagctgttggggctatagctaatcaaataagcaagcattacttcattcctgctatttgcaagcatctgttaggatggccataaaaggtactttctctgtcctcaagaatcttatagctgttaatagttagaagatagactcctacttcaaaatccttccatgtcatagaaacttccaaatcattgatctcctatcagatacgttaatttcaaatacttttgctaccaggccttttcctggctttacttgctactttttttttttttttttttttttgaggcagaatctcgctgtgtcgcccaggctgaagtacagtggtgtgatctcagctcactgcaacctcctctctggttcaagtgattctccttcatcaacctcccgagtacctgggattacaggcgcccaccagcatgcccggctaatttttgtgtttttagtagagagggggtttcaccatgttggccaggctcctcttgaactcctgatctcaagtgatccacccaccttggcctcccaagtgctggaattataggcgtaagccactgcgcccagccctccatcttcttcattagtctagattttatgattcatcattaaagtaattctcttgcagatagcctcagtttacatacccacttgaagagatgccaaccttagatgaaactcatctatcttctcagtgtctgtacccaaatagctgattatactggagaaaaatcgtatcatacagctgactgacttcactttaaattcaagatgacaggccaggcacggtggctcacgcctgtaatcccagtactttgggaggccgaggcgggtggatcacttgagatcaagagtttggctgggcgcggtgactcacgcctgtaatcccagcactttgggaggccgaggtgggcggatcacaaggtcaggagattgagaccatcctggctaacacagtgaaaccccatctctactaaaaatacaaaaaattagttgggcgtggtggcgggtgcctgtagtcccagctacttgggaggctgaggcaggagaatggcgtgaacccgggaggcacagcttgcagtgagccgagattgcgccactgcactccagcctgggcgacagagcgagactctgtctcaaaaaaaaaaaaaaaaaaaaaaaaaaaaagaagaagaaaaaaaaaagatcaggagttcaagaccagcctggccaacatggtgaaaccctgtctctactaaaaatacaaaaattagctgggcgtgttggcacgtgcctgtaatcccagttacttgggagactgaggcaggagaatcgcttgaacccggggggcagaggttgcagggagctgagatcgcaccattgcattccagcctggtcaaagaagcgagactctgtctcaaaaaaaaaaaaaaaaaaaaaaagaatgaaaaaaggaaaaaaattcaagatgacaaaactttagattaacattcaaaacttcttggcagtctactttctccatttaggtgtactttcccactgagttagacaggcatctcatatctcatacttcgtcttctgttatcagaactttatgctcctcttcaactctcattcttagccaaaaacctaacctgctctttgcatcaaatctacatttgtgcccatcttttcttatctcaggttacaattgagaaagtgtcccttttcttctcaaaggcccattctatcaatatgatttggttaccatctcctgccaccttctcaaggactctactccttccattttctcttgtacctctctatgagattatcctcatcagtatacaaatatgtctagtgtctcctccattaggaaaaaaccttccctggaccccttcagtttctttttcctttacttatgctcctattggtgggaagatttggaaatagacacagtaggttaaataattgcccaatacattgtatttaagtagcaaatactggactcaaaccagacttcagagatgatgttcttaaaacttcataagaggccagcatggtgtttcatgcctgtaatcccagtactttgggaagccaaagtgggaggattgcttgagaccaggaatttgagaccagcctgggcaacatagtgagaccctgtttctgagatgccatttctaaaaacaaacaaacaaaaacagacaattaaaaatattagcccagcatgatgatgtgtacctgtggtcctagctactcaggaggctgaggtggtagaatctcttgagcccaagaggtcgaggctccagtgactgggatcgtgccactgcatgttttctgctgtattgctagtgcctaaggcagtgtttggctctcagtaaacaataaatgcttgaatgagtggagataatagatgtccaaaaacatgcctgatatataaaatgaatgtcacagaggaaatgggttagctgtttaaggaatagaaaggggtaatttcaccctagagtgatcatggaatactttatggagaaaagattttggaccagacttctgaagaatgctaaatttgggaaggaaggaaattaaaagcatttaactgtatagaatgggatgaacagaggatgggaaggcataagttagaaggaaaagacaataaataagcaaggtcatttaactggtttagagtttgtgtagaaaagttgtaggagatgacccttaaaaagatacatcaaactgggcatgatagctcacacctgtaatcccagcactttgggaggccacggtgggtggatcgcttgagctcaggagtttgagaccagcctgggcaacatggcaagaccctatctctacaaataatataaaaattagccagacgtgggctgtgcctgtagtggcagctacttgggaggtggaggcgggagaatcgcttgagcccaggaggccaaggttgccatgagccaagattgtaccactgctctccagcctgggcaacagagcaagattttgtctccatctcaaaaaaaaaaaaaaaattaagatcctatttcagaaggttaagaagtttaaacttgattttatgaagagtaagcattagctggtcaggaaactaagatagtgacaataaagagaagtagggaaaagatgttgtaaagggcagcgcttgatgactgacaataaaaaatacacctcagcccaacaatgtattacagtaacttagtaaacctaaaaagtgtttgagaggggaagacagttttgttggaaacatgagtacaggtttagagatgacaggtttgaggtgacaaaccccgagtgaaaatttctagctgtattgagagatgtggaactaagtcacacagagaagtaaaaatggaatctggaaacgaaagatccatgagaaaggaagggagtaggatatagaagagaaagctaacaaactttcatcttttctgcaacttcaggcagtgtaatggggagccgtttttccttgtctaagtgagtcttaatgttctctggctttaaggatgtgctgcataagtggccagtccacaaagtatccttgaacctggcccatgcccatggaccaactcttctgttataatcttttgaagctttattataattttagttattttgaaaaacatggcattattttaatctagatagattatacccacttctgccatgggcacaacttactgttggagatcaaaacaactgaaacaaaatctgccttatatcagtgttacagaagaggcttcctagtgtttttctatcctcgggactcaactctgttgagtttttttttcttttcttttctttttttttttttttttttgagaaagagtcttgctctgttgcccaggctgtagtgcagtggtgtgatcttggcttgctgcaacctctgcctcccaggttcaagccattctcctgcctcagcctcccgaatagctgggattacaggcatgacggccaccacgtccagctaatttttgtatttttagtagagacgaggtttcaccatgttggccaggctggtctcaaactcctgacctcaagttaatctgcccgccttggcctcccaaagtgctgggattacaggagtgagccaccgtgcctggcccaagtttatttaaatttaacatcaagtaacctagcttgatagcctcccatttttcttattttcctttttttttttttttttatttgagacggagtctctgtcgcctaggcaggagtgcagtggcgcaatcttggctcactgcaacctccatctcctgggttcaagcagttctccagcctcagcctcccaaactgggattacaggtgcctgccacccaacacagctaattttttgtatttttagtagagacaaggtcttgctgtgttggccaggctggtcttgaactcctgacctcaggtgatccacccgcctcagcctcccaaagtgctgggattacaggtgtgagccaccatgcccggctttttgttgtcattttaattgtttattgctccactgatattttctttgcagaccaaaatgttacaatttttttttttttttttgaggcggagtctcattctgtcgcctgggctggagtgcagtggtgccatctctgctcactgcaagctccgcctcctgggttcacgccattttcctgcctcagcctcccgagtagctgggactacaggcgcccgccaccacgcctggctaattttttgtatttttagtagagacaggttttcaccgtattagccaggatggtctcgatctcctgaccttgtgatccgcccaccttggtctctcaaaatgctgggattacaggtgtgagccaccgtgcctggctggctgccatatgtcttatgagacagccaagctagcatgtcagtatcgagtagacctaatccattgttaactctcctcagaaataaattcttttttttttttttttttgagattgggtctcactatgttgcaccggctgttcttgaactcctgagcgcaagcaatcctccaacctcagcctcccacatagctgggattacaggtgaatgcctctgcacccagatcctcataatcattaggaagaaagagctgagggggaggggtggaggaggatgcttaggagaccttttatgataataagggaggaaacattgagaagaggaagagtaagttatagaagctatagctattgcgtgagctccattagaaatttgatagctaaagggaattagggctgtttaaaatgtcactcttacatccgtcatttgacatgatatgtgacctttttaaatagaaatgttttcccatgttttgacagggacttatgtagaataagtatttagactacagtacataatatctatagttgccatggcaactcagcatagcatgctgacactccaaagttgtacaaatagaatcctaatctgagaatgtttaagtagtcagataatgtctgtcaacaataaactaaagcaaaattctcaagtaaatatagcctgttaaaataacatttacagatggctgaacaactatatagatcgttgactttttttaaagaaaaagaatgctaattaattaataatagaaaagattacatttcatcagcctaagagctggaaccagggatatagagaggatgttagactattacttaaatctaaatattatctactctcatttgttttctcaatttaatgaagtaaaaccccattatatgttaggtctctctctaatagaaaagtcataaagttgagagctacagttaggttacaaaatgaattagcccatgcttgttcaaagtactgcagtagttttaaaattctgggccgggtatggtggctcatgcttgtaattccagcactttgggaggctgaggccggaggattgcttgaacccaggagttccagacaagactggggaatatggcgagatcccatttcaattaaaaaataaaaacagttctgagaagacaatttaacataagtaccagttttaaaagcacatgcccatgcgggcatggtggctcacgcctgtaatcccagcactttgggaggctgaggtggatggatcacaaggtcaggagttcaagaacagcctggccaagatggtgcaaccctgtctctactaaaaatacaaaaattagccaggcgtgggggtgggcgcctgtaatcccagctacttgggaggctgaggcagagaattgcttgaacctgggaagtggaggttgcagtgagctgagatcgtgccactgcactccagcctgggcaacagagtaagattctgtctcaaaaaaaaaccaaaaaccaaaaaaccacaaaacaaaaaaatcacataccctttgacagaaaatttgtcttacagaacatttcacatatatgcaaagataaatgtacaaataatttataccaaagcataattaaaatggtaaaagttagaaacatactgcatcactataaaatgagaagtgttaaattatgctcctaagcagttattaagaagagctaacctgatggtatcccaatccagtaacagaagatggctatgatggcactgggagggcaaggtagaaagggccaaataagctggagaacagagcatgcaatccatccccatgatcttaccctgggagcttgtccactatcctgttgtcagtctacctacctattcccaatcatctgtggcctttcctttgccaaggaagtctattcaattggaaaagaatcccctgtcatgttagcacttaatattacctggaggtaggagaaaggagaacttcgttcatcttatttcctggggacttagtccccagagtgttaatatttcctcctctccaagaaactgaggcagattctgctctctgtcctcttggccactggttccaagtctttctttaggcatgaccctcttttgttgtatatgtgtcctttgctccttccatggattcccatgatgtgagagattttatctgccaaatagtaacgtaatttttcccttccaaattaacaaagccttccgtaactgtatacactaaagtcagtgccctaaaggttgggaaaatcatgtcttcagagtgtaccgtgctaaacgctttacatgaattattttatttagtttttaaaacaatcccataaggtcggttttatttacattttacagaaaaggaaacaatattctcagtcacatagtaagtggaagaaccacttatataaaagaagtatatgaaaatgcatagaaaataatctgggaaattatttctgggagatggagagtggtgaagagctttcagttttttctccgccacttcctctttttttttttagacaaagtctcactctgtcacccaaactggagtgcagtggcatgatatcgctcactgcaccctccgcctcccaggttcaagtgattcttgtgccccagcctcccgagtagctgggattacaggtgtgcaccaccacgccccactaatttttgtatttttagtagagacagggtttcaccattttggccaggctggtctcgaactcctgacctcaggtgatccactcgctgggattacaggtgtgagcccccatgcctggcctctctacttctttttttttttttttttttttgagatggaatctcgctctgtcacccaggctggagtgtagtggcacgatctcggctcactgcaagctctgcctcccaggttcacgccattctcctgcctcagcctcccaagtagttgggactacaggtggccgccaccacgcccggctaattttttgtatttttagtagagacaaggttttaccatgttagccaggatggtctcggtctcctgacctcaggtgatccacctgcttcggcctcccaaagtgctgggattacaggcgttagccactgcgcctggcctccggccctctacttttatattgtttagatttttaatataagcatatagttgttttgtaatttcaaaaaaaaattctcaaagataagaaagaaaatttgggctgggtgcagtggctcacgcctcccagcactttgggaggccaaggtgggtgaatcaccttaggtcaggagttaaagaccagcctgaccaacgtggagaaaccccatttttactaaaaaatgcaaaattagccgggcgtggtggtgcatgcctgaaatcccagctacttgggaggctgagggaggagaatcccttgaacccgggaggcagaggttgtggtgaggcaagatcatgccattgcactccagcctgggcaacaagagcgaaactccgtctcagaaaaaaaagaaagaaaaaatttggttctcctaggcctttaacataaaatgttctaaaggattttcctcataatttaaatgggaattatgactccaaagtagatttctagagtagaaattaccctttagcatcattcacttaaactttgtagaaaaattcaaaggtatctggtatggaatgggtagtctaaagcagagatttccttgagtggctcataagacagttttcatggcatttcatttacttctcttttctttcctttttgttttctctttaaaattctttctacttatttttctgttttctccaattgttcattttaaacatcttgtttatactattggagtaaatatgtttttttcttctttcttgctcacactcgaaatttgctatagacactccgagggcattgactagtccctttagtacccctaaagaatgaactgctcaataaagtgaagtataagtttgatatagacatgctaaaattaactgggctttggatcatggcccattattgattaaagctaaggtaaatggtcttccaagtttctgtacttttgaattgatcagtcttgtgttggtatgcagttctagaattttattactggccaggtgtggtggctcacgcctgtaatcccagcactttaagaggccgaggcgggcagatcacttgagtccaggagttcaagaccagcctgggcaatgtggcaaaaccctatctataaaaaaatttaatcgggtgtggtggtgcacacctatggtctcagctatttgggaggtgagatgggaggatctccagagcccggaaggcagaggttgcagtgagccaagattgcaccactgcactccagcctgggcggcggagtgagaccctgtctccaaaacaaaaaaaggccaggtgcagtggctcgtgcctataatcccaacactttgggaggccaaggcaggcagatcacctgaggtcaggagttcaagaccagcctagccaacttggtgaaaccctgtttctactaaaaatacaaaaattagctgggcgtggtggcatggacctttaatctcaacaactcaggaggctgaggcaggagagttgcttgaacccaggaggtggaggttgcagtgaaccgagataacgccactgcactccagcctgggcaacagtgagactatcgcaagaaaaaaaaaaaaaagaagaaaagaattttattacctactttgggctatatttctaagcagtccagttctgacaggactagctgtatgtactgagacacaatcagctttacatatttttctagctgtatttctattaatatcagaagggaatgcctccttcctaccactgtcatttttaaatgtttttttccctttgccttggaggaattataaagatgtcatgaggagcttggtcagctgtatcagaaatacaatgttcatttctactgttgtttttgttctctatagcttcccattgaccggggtggaggtgaaggaaaggccatgtacattgacactgagggtacctttaggccagaacggctgctggcagtggctgagaggtaggttactggtttagataagagagactatggctacacttatcaatgtagtgattgccagggttagtttggccgaagaatgtctcttctataaccccacgtcccaaagttgtatgtgtggttcaaaagaatgacttccttagtagaaaaaggcattcttttttttttttttcttcagatggagtctcgctcttgtcacccaggctagagtgcggtggcgtgatctcaggtcactgcaacctctgcctcccgggttcaagcaactctcccacctcagccttcctagtagctgggattacaggcgcacaccaccacacccagctaattttttgtatttttagtagagatggggtttcaccatattggccaggctggtctcagactcctgacctcaggtgatccacctgccttgacttcccaaagtgctgggattacaggtgtgagccaccgcacccggccagaaaaaggcattctttagagttgctgtcagactggatttaaaaaaaaaaaatccaactatatgttttcttccagagaaaccctttagaaagtaaaagaatggagaaagatattgcatgcaaatagtaaccataagagacactgcgtggctatactaatatcagacaaagtacactttaaggcagacacattggctgggcgctgtggctcacgcctgtaatcccaacactttgggaggctgaagcgggtggatcacgaggtcaggagatcgaaaccatcctggctaacacagtgaaacctcgtctctattaaaaatacaaaaagttagccgggtgtgttggtgggtgcctgtagtcccagctactcgggaggctgaggcaggagaatggcctgaacccgggaggcggagcttgcagtgagccgagatcgcgccactgcactccagcctgggcgacagagcaagaatccgtctcaaaaaaaaaagacaaacacattatatacaaagaggaacattttataattaaaaggtcagtttgtcaggaagatataacagttgtaaagatacacacacgcctaacaacaaaaccccaaaataacatgaaacaaaaactgaattaaaggggaaaatagacaactcatcaataatagtaagggaccagtttttcattttcattaatggatacaggcttcaatatttcactctcaataatgaatataacatgtatcagaggccctgctaaagggcatctgtgaaaaacctacaggtagcatcatactaaatggtgctctgttacccaggctggaatgcagtggtgctatttcggctcactgcaacttccacctcttgggttcaagtgactctcctgcctcagccaaaaattagcctggctaatttttgtatttttagaagagacagggtttctccatgttggccaggctggtctcaaacctgacctcaagtgatctgcctgccttggcctcccaaaagtgctgggattacaggtgtgagccactgcacccggccttaatggtgaaattctgaatgcttttccccctaaagtcagtaacaaggcaaggatgcccactttcactatttacattcagcaatgtaccaaagattatagacagtgtagtcagacaagcagatgaaataaacggcatccagattggaatggaagaaggaaaactatttgctaatgacatggtgccatatgtagaaaatcctaaggaatccatccacaagaaaaactagaactaaataactgttcagcaaagttgcagaatacaatatcaatatacgaaaatccattgtatttgtatatactagacaataacaattcaaaagtaaaacttgaaaaaaaaacttcattcacagtagcaagaaaaagaataaaatacttaggaataaatttaacaaaagaaatgtaagatttgtacagcaaaaactctgaaacattactgagaaaaattgaagatttacataaagagaagcattccacatcatggatgggaaaactcaagattactaaaatggcattcttggccaggtactgtggtgcacacctgtaatcccaacactttgggaggccaaggtgggcggatcacctgaggtcaggagttcgagaccagtctggccagcatggcaaaaccctgtctctactaaaaatacaaaaattagccaggcatggtggcacactgcctgtagtctgagctacttgggagggtaaggaaggagaatcacttgaaccagggaggcagaagttgcagtgacctgagatcgcgccactgcactccagcctgggtgacaaagcgagactctatctcaagaaaaggcagttctcctcagattttatctatagattcaacccaatccttatcaaaattccagcaagctttttttgcagaaatttacaaagtaatcataatatttatggaacataacgtggaaatgcaaaggacccagaatagccgaaatgtctggaaaaaaaagaaaatttgaggtcttagactttttggtttaaattcttattataaagctacaataaccaagacaatatggtgatggcatatggataaatatggagagttcggaaatgaaacctttatggtcacttcatttttgacaaaggtaacaggcaatttttttaaaatttaaaattttttacaaatacacgtggtctcgctgtcttgccctggctggtctcgaactcctggcctcaggtgatcatccctactcagcctcccaaagtgttaggattacagatgtgagccactaaacctggctgacaaggcaatttaatgagggaaaaaatggtcttttcaataaacagtgctgatgtagatgaatttccaaatgcaaaataactttagacccttactatataccacacataaaaattaaaatagataacagtgtggtcattcctcaaaaaattaaacacagaatgaccatgtgatccagcagttccatttccagctatataaagaattgaaaacaggaactcagatacttggacagcgatgttcatagcagcattactcacaatagctttggaaataacccaatgtccattgacaaatgaatagataaaatgtacatacacacaatgaaatatcattttagccttaaaaggaagaaaacacattttttttcttagacctagtcctgcagataaaaaggtaggaaattctgacacatgctattaacatccactaaccttcagggcattatgctaagtgaaataatttagtcacaaaaggacaaaaactgaggccaggcgtggtggcttatgcctgtaatcccagcactttgggaggccgaggcaggtggatcaccttaggtcaggagtttgagaccagcctggccaacatggtgaatccccgtcactactaaaaatacaaaaaattagccaggtgtggtagcacagacctgtaatcccagctactctggcggctgaggcaggagaatcgcttgaacctgggaggtggaggttgcagtgtgccgagatcatgccattgcactatagcctgggcaacaagagcgaaactctggctcggggaaaaaaaaaaaaaaaaggacaaaaactgtatgattccactaacatgtggtacttcaaaatcaaagagacagaaagtagaatggtggttttctgggggtagggagactggggagttgttgtttaatggtacagtttcagtttgggatgatgaaaaagctctggagatgaatagtggtgatggttgcacagcagcatgaatgtccttaatgtgcctgaactgtatactttaaaatagttaaaatgctcaatttaatgttatatgtgtacgttttactatactgtttttagaagggtgatagtcctaaataagagcctaactataatttttcagagagaacatgggagaaaatcttagtgaccttggggtaggcaaagatttattagctacaacaccaaacacacagtccatgaaagaataaattgataatagagttagttttcacttcatcaaaattaaaaacttctgtgcttcaaaggacactatgaagcaagtgaaaagataacccaaagaatgtgagaaaatatttgcaaattacgtatctgataaatgtctagtatctagaatatataaagaactattataacccaacaataaaaagataacccagttgtttaaatgggcaaaggatttgaatagacatctctccaaagaggatatacaaatggttgatgagcacataaaaagatgctcaacatcattagtcatcaggaaaatgcaaattgaaaccatggtgagctaccacttcacacccactatgaaggctataataaaaaagatggtaacaaatactgggaggatgtagagaaactggaaccctcatatactgctggtgaaaatatacaacggtggtctctttgcaaaataggtggcttcttaaaaagttaaatataaatttaccatatgatgcagcaatttcactctagttatataccccaagagaaataaaaacatgtctatacaaagacttgtatgataatgtttatagtatcattataatagcccaaaatgttcatcagctggtaaatgaataaacaaaatttgttttctccatacaatgggatactcttcagcaataaaaaagaacttaagtactgatacgtgttaacaacatggatgaggtttcaaatatgctaaatgatagaagttaaacacaaaagaccacacaatgtatgattccatttatatgaaatttccagtaggggataatctaagggatagaagaattgtggttagtggcgataggaatgaggaataactgtgaatgaagttgagagattttttaggggtgatgaaaatgctctaaaattggattgtgttcatggttatacaactctgcaaattcactaaagctctcaatgaattttatacttacagcaggtcatttttgaggtatgttaattatacctgagtaaagctcgtgaagagtttgtaagtttctatatcaaataaagtttttaaatacatcctcaaaactgtttcacttcttttcctttgtctagggtcaaatgtggtaatttagtccctgccacacattttatggaaacccagtgataaaacaatttaattgtctgctgagatgtcagactcaagttggaacctgcctaaatgaggagaatattctctctcgttttataatcgaattatctttcccagcttataatttgagaactgcaacctattgaatgtataccactgaagcataaaattaggttggaatggtaattgcagctttttgtctctgcctacaaaattcctatgaaggaaaaggaattactcttttgcagtctgatcttagttttctgaggatgtatatacttaattgtgtcttccctctcaaaattgttttggcaatcatgtacagcattcatacttttaagtatactgttttagtagtttaaggattagcttttggacagagtcactaaaacattctcttgtaacataaataagtattcagataggatagatgacctagtagaatataggctatgaggacaagaactttgatttggtcacctattggatgcccaagcagtagagcaatgcattcaggatttgttaatgaatattttgctgacaaaaaattttttgttgtttgtttttttagagacgggtctcactctgcccccactagaatgcaatggtgcaatcatagctcactgcagcttctaactccagggctcaagcagtcccccctcctcagtgtagctgggattacaggcacacaccaccaagcccagctaatttttttatttctttttttttttttttttttttttgagacagagtctcgctctgtcgcccaggctggagtgctgtggtgcgatctcggctcacgcaagctccacctcccaggttcacgccattctcctgcctcaacctcccaagtagctgggactacaggcttccgccaccacacccggctaatttttttgtattttttaattttaattttttttaattttttttaatttttttttttttttttttttgagacagagtctcgctctgtcgcccaggccggactgcggactgcagtggcgcaatctcggctcactgcaagctccgcttcccgggtccacgccattctcctgcctcagcctccccagtagctgggactacaggcgcccgccaccgcgcccggctaattttttgtatttttagtagagacggggtttcaccttgttagccaggatggtctcgatctcctgacctcatgatccacccgcctcggcctcccaaagtgctgggattacaggcgtgagccaccgtgcctggcctatttcttatttttgtagagatgaggtcttgctgtgttgcccaggctggtctcaaactcttggcctagagtgattctccctcctcggcctcccaaagtgctgagattacaggcaggcataagtgactgtgcctcgctgaaaaatatgtttacatagaaatttcattaatttgttttaatcaggtctctttatcaagaaaaaaattttataattgaattatatttctgagaatgtcacaaggcctccttaagctaataaaaatagccctctttcattcacaacaaaagagcccttactgattaatttttgccgtgccctgttgaagaatattagcccacatgcatgttactgtagctctggggttcccagaacatggtccccagaacagcagcattatcattacttgagaacttgttagaaatgcaaattgtctgatgggacttcagatctactgaatcagaaacaatcagatactcgggctagcaacctgttttaacaagctctccagggccagacacggtggctcacgcctgtaatcccaacactttgggaggccaagggagtggatcacctaaggtcaggagtttgagaccagcgtggcaacatggtgaaaccctgctctactaaaaatacaaaaactagctgggcatgttagcgggcacctgtaatcccagctactcgggaggctgaggcaggagaatcacttgaacccaggaggcggaggttgcagtgagccaggatcgtgccactgtactccagactgggcgacagagtgagactccatctcaaaaaaacaaaacaacaaaaaaaaatgcaagctctccaggtaatctgatgcttgctaaagtttgaaaaccatgaccacaattgctagcctttcttgaaagtctgaagtactgtgaaagaatgacagaactcctttgagatgagcttagtttttcaaacttatatgttaagaataacctgaggtatttgttaaatatacagattaccaggctcttccctgataattgtaattcattgagtctaggttaggcccaggaattttttttttttttttttgagacggagtttcactcttgtctcccaggctgccaggctggagtacagtggcgtgatattggctcactgcaacctccgcctctcgggttcaagcgattctcctgcctcagcctcccaagtacctgggattacatgcgtgcaccaccacacccatctaatttttgtattttttaagtagagatgggttttcgccttgttggcaaggctagtctcgaactcctgacctcaagtgatccgcctgccttggcctcccaaggtgctgagattacaggcatgagtcaccacagcctgcccaggaatttgttttctaacgggtgttccaggttattatctttaaggaagttcaagaaacactatgaaagaggatgctatggccgggcgcggtggctcatgcctgtaatcccagcactttgggaggccgaggcgggtggatcacaaggtcaggagatcgagaccatcctggctaacatggtgaaaccccgtctctactaaaaataaaaaaattagccaggcgtggtagcgggtgcctgtagtcccagctactcgggaggctgaggcaggagaatggcgtgaacctgggaggcggaacttgcaatgagccgagatcgtgccactgcactccagcctgggcgacagagtgagactccgtctcaaaaaaaaaaaaaaaagaggatggtatttccagccaacttgtcccaagctgtgggaattccatgtcctgcttctggagcctaagcacagaggttcccatagttttttttgtgagtgccgctgagagaaaagctaggataactctttattctggtaaaccttctctgtttttatagcaaatagataatctccctttcttttttaatttttaatttttttttaattttataaatagagatggggttttgccatgttgcccaggctggtctcaaactcctgagctcaagcaatcctccccactcagcctcccagagtgctgggattacaagcatgagccaccgtgcccagccttttctccctttctgatagtagattatatcagtgtatttttttgttcgtttgtttgtttgtttttgagacagagtcttgctctgtcacccaggatggagtgcagtggtgcgatctcggctcactgcaacctctgcctcccggtttcaagcgattctcctgcctcagcctcccaagtagctgagaagcagggattacaggcgcctgcaaccaacccggctacattttgtatttttagtagagatggtgtttcaccatgtagtctaggctggtctcaaactcctgatctcaagtgatctgcccacatcagcctcccaaattgctgggattacaggtgtgagccactgcgcccagccatatcagtgtttcttgaggcagaactagaagacttgtgcagtaaagtacttacacctgttacatcttttttttttcaccatacattcatgatctaaatagagaaaacttatatctcttcattcttgttttatttggtcaggatcgtaaggtgtaactctatcctaatgccatctgtttatcctcatgacagaatcgtgaacctagaacataatcatagcacactgggttttatgtaaacattctctttttttttttttttttgagatggaatctcactctgtcacccagtctggtgtgcaatggtatgatctcgactcactgcaacttctgtctcccgggttcaagcgattcttctgcctcagcctcccaagtagctgggattacaggtgcctgccaccacgcccggctaatttttgtatttttagtagagatggggttttgccatgttgaccaggctggtctccgactcctgacatcaggtgatccacctgcctcggcatcccaaagtgctaggattacaggcgtgagccaccgcacctggccctcaaagaataggtttgatttaggtcaggcgtggtggctcacgcctgtagtcccagtattttgggaggccaaggtgggcggattatgagatcaggaggtcaagaccagcctgatcaatatggtgaaaccctgtctctactaaaaataaaaatattagctatgcatggtgctgcatagctccatgctactttggaggctgaggcaggagaatcgcgtgaacccaggaggtggaggttgcaatgagatcacgccgctgcactccagcctgggtgacagagcaagactccgtctcaaagaaaaaaaaaaaagaatggatttgatttatcccaaagacttgccaggtagagctccagagtagttgggtgctatcatctctctgcttatagtttgcctgaacttcttaatagaaagggaaatacattctttggtcctgaaactactgtcagtaccacttcttccctacctattcaggtaatttaagtgtcagaaacaaattgctcatctgcctgagttctgtgtgcagcctaaaaatgttctctcctctctcataggtatggtctctctggcagtgatgtcctggataatgtagcatatgctcgagcgttcaacacagaccaccagacccagctcctttatcaagcatcagccatgatggtagaatctaggtatgtgttcagtataagacaccaaatatgttcttaagagtccttccctgaatcttgtaatggctatttggccagattgatagtagtttgaattagaaatgaggaggtttaagtataattcctgtgttgacactcttgctttgtagtttaggtcaagtcactattaaaaatgaaaccataatctacttgaacttgctggaaatcttgttaaacggtgcctcagatgttagtactgtgcaaatattttaataaaacatctatatacaggccgggcgcggtggctcaagcctgtaatcccagcactttgggaggccaaggcgggtggatcacaaggtcaggagatcgagaacatcctggctaacacggtgaatccgtctctactaaaaaaatacaaaaaaattagctgggtgtggtggcgggcgcctgtagtcccagctactccggaggctgaagcaggagaatggagtgaacccgggaggcagagcttgcagtgagccaagaatgccccactgcactccagcctgggcgacagagctagactccatctcaaaaaaaaaaaaaaaaaaaaaaaaatctgtatacaggaaaaactatgaatatgagattttagggtggtaaggaagggaccagaatctgacacaggctagaaataggcttcagagaatccttgtttcctgtaggtatgcactgcttattgtagacagtgccaccgccctttacagaacagactactcgggtcgaggtgagctttcagccaggcagatgcacttggccaggtttctgcggatgcttctgcgactcgctgatgaggtaagttgtgggatagggacagagaatgcctactttcagtggctgtgaattccaggagccttgctaggaggctaagacatcagtgcctgagatcatcaagctcttaggaagaagagagacattagttattcgttattttgtgggggaaagtggtggcagcattaaggcttttggagtgtctatggccacaaaattgacatttatcctttccccatcagtttggtgtagcagtggtaatcactaatcaggtggtagctcaagtggatggagcagcgatgtttgctgctgatcccaaaaaacctattggaggaaatatcatcgcccatgcatcaacaaccaggtaaggtgttgatgggatcagttcttcttttcggaatgtcatattaactgtgaagacatgaagatataacattttcatttaagccctgttaaagctactgttgtatagacacttaggaactcttgctaatctaattaacatgctctcgttggtatagatgttttagttcataaaagaattaaaaacccacaagtgtggaagaatgaatatgagtaattgatatgcctctcccctgttatttaaaaaatgtttgggctgggcacagtggctcacactggtaatcccaacactttgggaggccaaggtgataggatggtttgaggccaggaattcgacactagtaagggcaacaaagtgaggcctctgtctctacaaaaaaaagtagctggtgtggtggcgtgtgcctgtagtcttagctacccaggagactgaggcaggaggatcagttgagcataggaattcgaggctgtattgagctatgatcacacatcactgcactccagcctggcaaaagagcaggacactgtcttgaaaaaattttttttctttttttttttttttttttgagatggagtctcgctgtgtcacccaggctggagtgcagtggcacgatctcggctcactgcaagctccgcctcccgggttcacaccattctcctgcctcagcctcccgaatagctgggactacaggcacccgccaccacacctggctaatttttttgtatttttagtagagatggggtttcacagtgttagccaggatggtctcgatctcctgacctcgtgatctgcccaactcagcctcccaaagtgctgggattacaggcgtgagccaccatgcccggcctaaatttttctttttttaatgtttgtttcaatatggacaatccactgagaggggccagggcaaaaatggattctgccaggttggaaatgcactaaggaaaacagtacagaaacattcccagggtccttctaggaagaatatatgtctaaaaaattttcagctctgttacaaagtcaggaacggaattgtttaattataataaattggtgctttggtctgtgtctttgggtcagattgtatctgaggaaaggaagaggggaaaccagaatctgcaaaatctacgactctccctgtcttcctgaagctgaagctatgttcgccattaatgcagatggagtgggagatgccaaagactgaatcattgggtttttcctctgttaaaaaccttaagtgctgcagcctaatgagagtgcactgctccctggggttctctacaggcctcttcctgttgtgactgccaggataaagcttccgggaaaacagctattatatcagcttttctgatggtataaacaggagacaggtcagtagtcacaaactgatctaaaatgtttattccttctgtagtgtattaatctctgtgtgttttctttggttttggaggaggggtatgaagtatctttgacatggtgccttaggaatgacttgggtttaacaagctgtctactggacaatcttatgtttccaagagaactaaagctggagagacctgacccttctctcacttctaaattaatggtaaaataaaatgcctcagctatgtagcaaagggaatgggtctgcacagattctttttttctgtcagtaaaactctcaagcaggtttttaagttgtctgtctgaatgatcttgtgtaaggttttggttatggagtcttgtgccaaacctactaggccattagcccttcaccatctacctgcttggtctttcattgctaagactaactcaagataatcctagagtcttaaagcatttcaggccagtgtggtgtcttgcgcctgtactcccagcactttgggaggccgaggcaggtggatcgcttgagcccaggagttttaagtccagcttggccaaggtggtgaaatcccatctctacaaaaaatgcagaacttaatctggacacactgttacacgtgcctgtagtcccagctactcgatagcctgaggtgggagaatcacttaagcctggaaggtggaagttgcagtgagtcgagattgcactgctgcattccagccagggtgacagagtgagaccatgtttcaaacaagaaacatttcagagggtaagtaaacagatttgattgtgaggcttctaataaagtagttattagtagtgaatgtgctgtttatagcaattattgcagtgcaagctatttcaagacagggtttccataatctttttggcactgtataggggtgatcagtttctgttgcttcaagatttgaaaccagaaaggaaagtcccacttgcagatgattgtgcttaaaagctaatggaaaaataaaagaaagacatacca

SEQ ID NO: 37 - DNA, 184390 bp, Homo sapiens
  source 1..184390: mol_type = genomic DNA; note = HGNC Approved Gene Symbol: BRIP1; note = Cytogenetic location: 17q23.2; note = Genomic coordinates (GRCh38): 17:61,679,139-61,863,528
tattttaaatgcgttttaatataggaaagtaatacaaaaaagtccagttgcagaaaaataacggggaaaagctttttgttaaaattaatgttttgaatagaaagatcttaacaacaaagccttatagaaacttagaaacagtgccaaatttaaacccatgtaataactaagtgcatagaaacatagtaatagttttataacacaattctagacagttttaaataatttaatcaagtcatgaaacatctactctttacattgtacctttattccaagaataaagccctgtctctaactggtagttttcctggtttgcagcctgtgtgctctatatactttcagtccttgaataaattcagtattagataattatttcatatgcattgaatgtgtcacataaattatttgataaacaatctctaccttatacatctcaaaagcttaaaaaataagccagccaaataatttttctttcctcaaatctttattgtcagtctatcacctatatatctatagttagggaagctttcatatagagcaagggtgcactccagatatatgattcatctactaattaataatgaataacttgcaatgtgccaggtgctcttttaaaagcatttagatgttttaacttatttaaatctgtaaacatttcttttaaaagtatgttatcagtaatgaaaatggcctacatcctactctataaaggccagtagtttacttcttggaatatcatcttggtcagtcatgatctgaggagaatatacacctgtttcaacagtgattatcattgtataaaatttttgaaacaccttttggaattactaaagggttgtgacacatctctatgtacattctcagtaatgaaaatttttaacttcagggagaattaaattttggaaagaataaaaaatatctaggccaggcatggtggctcacgcctgtaatcccaacactttgggaggccgaggtgggcagatcacttgaggtcaggagtttgagaccagcctggccaacatggtgaaaccctgtcgatacttaaaaaaaaaaaaaaaaaaaaattagctgggtgcagtggtgtacacctgtaatcccagctacgcaggaggctgagacatgagaatcgctttaacctgcgaggcagaggttgcagtgagccaagatcgtgcctttgcactccagcctgagcgacagagcaagactgtctaaaacaaacaaacaaaaacatatctagctagggaaaggggaaagtattggagatgaagttgggtaataacactaagatatgaataatatgcttaattttctcatgtagtttaccaattctaaaggtaatttctttttttttttttttttgagacggagtcccgctctgtcgcccaggctggagtgcagtggcgcaatctcggctcactgcaagctccacctcccgggttcacgccattctcctgcctcagcctcctgagtagctgggactacaggcgcccgccaccacgcctggctaattttttgtatttttagtagagacggggtttcaccgtgttaaccaggatggtctcgatctcctgacctcgtgatccgcccgcctcggcctcccaaagtgctgggattacaggcgtgagccaccgcgcctggccctaaaggtaattttaaaagtcctcaaaatgttttaattgtagcattgcgaaaataaatatctagctttccaagttattatgcacatataccatctgtgtcagtctgttctcatgctgctaataaagtcatacccaagactgggtaatttataaaggaaagaggtttaattgactcacagttctgcatgactgaggaggcctcaagaaacttacaatcatggcggaaggcaacttttcacagggcagcaggagagaagaatgagagtgaagcagggaaaagctccttataaaatcatcaggtctcataagaactcagtatcacgagaaccgcatgagggtaaccgcccccacgattcaattacctcccactgggtccttcccacaacacgtcgggattatgggaactacaattcaagatgagatctggctggggacatagccaaaccacgtcaccatcgttccctaaatgtaaatgagtaagagccactttactttttaaatgaaataatatgctttattttaaccgttctggaacaaaagcaaatgaaaatcgactcagaatatcaacagacattcctttatagattctcaaagcacaaagaaatttgtatgattttatagtactaaccgctgcattttacagatgaaactaattccctgaagggtgtggtgattgccaatatgacttagcaaatcagtggcagagccaggtgtagagcccaagtctcttgtcttctaccaggtatttattcgtttcactaccctactatccctatctgtggtttaagaataataccagaggagataaattgtttcaccctttcaaaacaatgtaaaaattaccttctaatcgagtatttggtatttactgctcaatgatcaactagaaaaaatatataatactagatgggatctaatatattctaaattctttaactggtaacttgtcaatttaaatgtctttgaactacgcttagagttgtaacatcaaatgctatagaaacaggctgtaaaaatctaaatgtctcaaaatggaagcaaagacatacctatataatgattcatttatccaaatgaaatgtaaagtaaatccttactggaaattttgacttgaaaataatagaccatacagaattcttggatagctcataaaatttcaattcaaattactcacaaaaagtcccaatgcccagtgaataacagatgtttcttaaaaagagatcaatgaatgtatttttggaatgatgtcagagatgagcctcttttataatcatttttgattagacatatagcttcattcacaaaaacacaaacaaggtcaaaattcacagaaaggattactgtgccctaaggaaacatattttagctgcagctataaatgtgggtttgcttatcaaatttatatatgaagttttctatcttaatcattgtataactaaagcttatgctagaacaataccagaggggataaattgtttcaccctttctaaacaatgtagaaattaccttctagtctagtgtttggtacttattactcactgatccactaggaaaaatatataatactaagcaggatctagtatttttttccacaatgatggtgaagctaaataattagaatagaaaatttggaatacttcatttggcattttatatctttacgtcaatttgtttatgacatgtttggttttaggtttattatacaaagaatgtaaaacaatttcaattaaaaatgcatactactttcttaatttctcttaattacttataagtaggcagtttaataacgaaataaacctttcaagacaaatggtgatctctgaaaaagtcttggactgatttgaggtaaaatctatagcgaaatatgactgaggtgtcactagattagactgctgttaatttttatgtatcagtgtgaaaacaaatggatgaagagaaccacctaatatgaatatttacgtgaaactagaagtgccctaggatctttgaataattttaaattgcatttagctaaggaagacttatttgaggacagtactttgtatgaattactttatcaaaactcaagaatgggccaggcactgtggctcacacctgtaatcccagcaacttagggaggcagagaagggcagatcacgaggccaggagttcgagaccagcctggccaacatggtgaaaccccatctctactaaaaatacaaaaactagctgggcatggtggtgcacacctgtagtcccagctactcagaaggctgaggcaggagaatcacttgaacctggaggtgaaggttgcagtgagcccagagcacaccactgcattccagcctgggcaacagaccaagactctgtctcaaaaaaaaaaacccaaaaactcaagaataataacatttacatttctgaacataaaatagttttttaaaaagtatgccacttattcaatttacaaattattacttacaacagagtttaacataagcatgatgacatatttttacttagcttgagagttaagtattattacttaaaaccaggaaacatgcctttatttttggaaggagatggtttaaagttctttatttctatttcatgagtttttcccagttccagttcatttatccaagttgtttttacattaccatcaatgtcatcaattttactttcttcaatatgcagaattccattcaactttgtatctatgcaatcctcagctttcacttctctggctgaatctacttcttttatagttctaatttcaaaaaggtctttagctaaaatgcaatctgaattgttagccaatctatttcctctatcagtttcagctaggtcatttttttcttcatctgtatcttcaggatcataaagttcaggtgtaaaatagatagattcatcttctgcttctgtttcaaaatctctatttgaagtggactgtttatcttcttcacttactagagacaattcaatgtctggatccagggcttcttcagaacagagcggatgttcagaatgattttttctagtaagggtggcatcaatctttaatgatgaaataatggtttctgattgagggcatgatccaaacgatgtgtttactgtcagatttgaggattcacatttatcagtgaagggcaaaacagttttactttccatcttctctgttttgaaacggggaggactagaggcactattctctgatgacccgagctcaggtgttgccttcggtattttaccagtaaaatactgtcccaaagaattaaagcttgaccagctaactctctttgtttgtttgttgaaagttgggcttgtggatctggaaatcacaattttttctgctttccctgcttcttccaggaatactggatcatctaagaatacaagaatttaagagatttaactttctgctcctagctaacataattgctaggttaaaataattatttattagaaatacctaaataactgtataggatacataacttagagcccccaacgaatactagtggattttcatcttggaacagaatattaactctgaaagaaatcttaggtctctaatgtttcctagcccaagttataatgctgtctggtaaactatcaaattccacagcagggagctcaagaatgaatgaggaaagaaggggtaaaagggaagaggaagggagctgaggaaaggagggaacaggctgtaaacatttgccttgaaaatccactaaccagtgactgagaaaaacttacctagactaattcttttatttaataaataaggaaagtgacataaggctaagttatttgctcaaagttataaaactggttagtaagaagaccaagactagaaactaggtttcctgattaccaagttaatcggcttgaattcactatttatagtgaattttgtattactattttgtagtatttatatacaaaattgtattactattttgtagtacttatatactacaaaatacatgtttaaaaattgatgtttttcttttttttagtccgagttttgcttttgttgcccaggctggagtgcaatggcgcaatcctggctcactgcaacctccacctcccagttcaagcaattctcctgcctcagcctcctgagtagctgggattacagacagctgcctccacacccagctaatttttgtatttttttagtagagacggtgtttcaccacactggtcaggctggtctcggactcctgacctcggatgatccacccgccttggatatatgaattaaaacaactgaaattatatccaatggaatagaccagagtttggcaaaccttttctgtcataggccagatagtaatatttaggctttgtggagcataatgtatctgttgcgactactcaattatgctgttctagtgcaatacacacaaatactcaactctgctgttgtttctaaaatgtaaataaatgggcatgactacatttcattaaactttatttacaaaaacaggcagcaggccaaatttggcccatgggccacagtttgccaatctgatacagatgattatttcaaaatattttaaaatattatttttcatcacttaaaataaatgtctctcacctcctaaaaataagttcataagaactatctatataggaaaagtagttcatatagaagtatctacataaaaattaggccaaatttttatatagcctttagaataacatctaccacttacatggtactttacaatgctgtgatatttataattttgacctttacaacccaacctgaagggatagctaggcaggcattttttttttcctattacgactcaaaaaggacaaatgacttgctcatgatcacaaagctagtaagtggcaaagccagttagtggaaaaccagaaaatatgctctggtctcctgacaaaagtttgttcccattacagtacaccatactgtttcactattttatgataacaccttatattacaaaccaccatatttaaggaattaatctatacccaaataaatatcatttcactaaatataatgaaagacttctctatcaaaggtaaatgggaagaacttttcatacttttctcctttctggagataatgctacttggtagaggtgaatttttggtaataattttaggacactgtagttcctggacacatatctttgcttcatcttccacaaaattttctggtgatagatgacttgctgcttccagtaaataaggtgaggtactgtactttaaagaggtcacttcaagtgtagactcattgtcctgtatattggttctgtcctttatggatacattaagaactttttgatgctttttggaaaattcagccaaggattccagtgcactttcaaaggttgaatggtgctgaatctgctgccgtacccatttagaaagtcctaaagaaaaaggtaaacccagggaaaatttggttacttagttattaaaatattacatgctaaggtaatacacttgctttttctagtgaagtaacctaatttgtattttgaatatacagaatggttctccatatgttttttctgcaattcagcaattttactacatatgtatcagtaacatatgagtaacattctctttatatacagtaattgtcaaatggagagagcaaagaggcagtagaagtagggcagagatgggaaaacatattctctggttaagaataactggtgaacatggcaaatttaatttcatcataattccccacaaaaattgccttttttttttgtagggaaactagaagttgtaaacaatacaactttccattctaatattctaaattttactccttttgcaaaaataatttcaagattctagtctcaagtttttttgttcccttcctccaccaattccaaatatatcttaaattaaaattattctggaggtgaaataaataacactgtcttatgggtaaatcacatcccttctgaatttttatgatataattatttttaatatataatcaagttataaaggatatgatttgacctgtgacataaaaactgcacaaaaatgaaacctaagagtttaaggtgttttctagtatggtgtgcttccaaatgaaatgcaaaatcaggtatttggacttttacaaaataaatattccctgctaacactactaaaactagcatcatcttttggaggaattagttttaaaagtcactatagggtaaaaatttaagttctagattttaaaactaaaaaaattttaaataagccatttcccttgaagttttttattttgttcatttggggaatatgattagaccataaaaatatgtgaaattctctaaaattgaaaatttttaggctgagtgtggtggctcacatgtataatcccagcatttggggaggctgaggtgggaagattgcttgaggccaggagttcaaggtttcagtgaactatgatcacgtcactgcactccagcctgggcaacagagtaagacctgtctctaaaaaagaaataagtaaataaaaataagaattttagtactatatttacctcttcatttcaacctttttataatcaaagaaagccttttcaatgtaaaatatcattgtctgcttttgaaaacttgaaagaatctgagctccacctgctgactagacaccagcacttagcatttttgcctttagttactgtttgacctatgctactgcacactttacgtggaaagggaagataaaacaaataaagcaatattttctgctttatgttttaatatcaaaccaaatacagtcattaagctctgaaattgaaaaggtagagtctacacccacacatggctaatctaaaacaaaatttaacatctctttattataataaaatgtattttttttttagctaaaaggtaataataaagatacacatgtatcccatagctctttagtaatcactcctggtattgactctgaaaactgtttactgttggatgaaaccatcgagtgagaaaaaaatgatactactgcctgcatcaaagcggtaggaaaatttgtggcaccctcttgtcatgatccccacttcagaatatacctggctgcttcttcctggggagaaaagagaaaactggaccttatgtctttttctgggaggctgccccagggactggcttctatcttacctgtactgaagagctgacatgagctggcataccctacatgcccaggggccactaagaacaaaagcgctgtgcagcaagtttctgctccacaggaaccacagtgcaacagaggcccatatagtttgatggccactccctcagggggacagaaaagcctggagtgtgcatccaacatcttggcttttcaaggagctgtctagggactcgtttctgtcttgcttgtcatagagtactgactggacctagcatactctgtatgcctggaatctactaagaacaaaagagagtcaggcgtgatggctcatgcctgtaatcccagcacttagggaggccgaggcaggcagatgacttgagcccagagcccaggagtttgagaccagcgtggacaacatggtgaaaccccatctctacaaaaaatacaagaattaactgggtatagtggtgtacacctgtggtcccagttacttgggagactgaggtgggagaatcccttgaacccaggaagccgaggctgcaatgagctgagattgtaccactgcactccaacatgggcgacagagtgagaccttgaccaaaacaaaaaaaaaccaagcaaatatttctaataaggaatttacagagaagtccaaagaagacagatccacggaaaaggtttgagaggctcccagaatgcctaccagggctgatgagtgaaggtctttccctgtacaaaaccagttagtaaacactgtgagaggtggctgttttttcaaatgtgtggataccatacaaggttacaagaaacataaagaaacaggaaaaaataaccctgtcaaaggaacaaaataagtctccagaaaccaacccttaaaaaaaaaaaaaagctatatgaattacctggcaaggaatttaaaataactgtcaacatgatgctcacaagttcaagaaaataatatagaaaaaaaggagaatttcaacaatgataaagaatacaaaaaagaactaaagagattttggagctaaaaaatgcaataactggactgaaaaattcactacaggggttcatcagcagacttgatcaagcagaaggaagaatcaggaaatttattttattttactttattttatatattttatattctgttatgttatgttatgttatgttatgttatttttttgagacagtctcgctctgtcgcccaggctggagtgcagtggcgccatctcggctcactgaaacctccgcctccctgattcaagcgattctcctgcctcggcctctcaagtagctgggactacaggcatgtaccaccacacccggctaattgtcgtatttttagtagaggtggggtttcaccacgttggccaggctggtcttgaactcctgacctcaagtgatccaccttcctcagcctcccaaagtgctaagaatcaggaaatttgaaggcaagtcgtttgaaatcatccagtcagggaagcaaaaagtaaaaaacaaaatggaaaaaaaaaagtgaaggcttatggcttcatttatgacttgacttatggggcaccgtcaagctgaccaatatacacattctgggagtcctagaaagagaaagagagaaaggagcagaaagcttatttatagaaataatgaccgaaaacttaataaacctggggggaggaaaatgacatccaaatacatgaagcccagtgaacctgaacaggatgaacccaaaagtctgtaccaaaacactttataatcaaagtgtcaaaagtcaaagaaaacaatagaaatttgaaaacagcaagataaaagcaacttgtcatatacaaatgaagtcccataagacagtcactaggccgggcatgaaggctcatgcctataatcccaacactttgggaggcagaggtaggagaattgcttgagccgaggagtttgagattagcctgggcaacatagtgagaccccatctctacaaaaaaaattaaaaattagccaggtctggtggtgcatgcctgtagtcccagctgaggctgaggtgggaggatcacttgagcctgggaggctgaggctgcagtgagtcatgatcatgccactggactcctgcctgggtggcagagtaacatcctgtctccaaaaagagaaagatttctcaggcgacatcttgcatgctgtaaggaagtgggatgacatgtttgaagtgctgaaagaaaaaaacctgccagtgaaggatattatatctggtaaagccatctatcaaaatgaataggaggtaaaaacttttccagataagcaaaagctgagggacttcaccactaaacgtgccttacaagatatgctaaaggaagcctgctaaacagcaacacaaaagcataaagtttgctcgtgaagttaaaagtgtacacaaatacagaatactttaatataacaacagtgatacataaataatgtttaattctatacagaagttaaaagacaaagtatgaaaataactataatagtatgttagtggatacactatataaaagggtataatttgtgactttaataataaaatgtgatgggaaaagtaaaagtgtagagtttatacaactgaaatgaatttgttagctgaaaatattgttataactatgtttcatgtaagacccatgtaaccacaaaggaaatatctatagaaggtatacaaaagaaaaatgagaaaggaatcaaagcatttttcttcaaaaaattaaaaaatgaaaagcttttaagaccagcaacaaagcaaggatgttcattctcactacttctatttagcttagtactaagaatcctagccagactattaggcaagaaaatgaaataaaaggaatccaaattgaaaaagaataaagtgaaatgatctctctttgcagatgacatgatcttttatgtggaaaaccctaaagattgaaaaaaaacctgttaggactaataaatccagtaaagttgcagaatacaaaaatcaatgtacaacaatcacttgcaattctatacactaaaaacaaccaaaagaggaatgtaagaaaacaatcccatttataatagtatgaatgaagctggaaaccatcattctcagcacactaccgcaaggacagaaaaccaaacatggcatgttctcactcataggtgagaactgaacaatgagaacacttggacacaggaagggggacatcacacaccggggcctgttgtggggtggggggagaggggggagggatagcattaggagatatacctaatgtaaacgacaagttaatgggtgcagcacactaacatgggacatgtatacatatgtaacaaacctgcacgttgtgcacatgtaccctagaacttaaagtataataataaaaataaaaattaaaataaaaaaactcaaaccagggaaaaaaaatagcatcaaaaataataaaatacctaggaataaacaactaaggaggcaaaaaacctgtacactggaaattataaaacattgctgaaaaacagtaaagataacacaaataaatggaaagatatcccatgttcacagattggaacacctaatattgtcagaatgtccatactactgaaagcaatctttttttgagacagaatcttgctctgttgcccaggctagagtgcagtggcgcggtcttggctcactgcaacctccgcctcccaggttcaagccattctcctgcctcagcctccagaatagttgagattacaggcacccgccaccgcacccggctaatttttgtatttttaatagagatggggtttcaccatgttggccaggctggtctcaaactcctgacctcgtgatccacctgccttggcctcccaaaacactgggattacaggcgtgagccaccatgcccggctgcaatctaaattcatatggaaccacaaaggaccacaaataggcaaaagaaccttgagaaaaatgataaaagctgcaggcatcatacctcccgattataaaatacattacacagctgtagtagtcaaaaaagtatggtactggcataaagagaaccatataagccaatggaacataatagagagctcagaagcagatccacacatatatggtcagcggatcttcaacagggtgtcattggggattgatatgctttggttatttgtttcctccaaagctcatgttgaaatgtgttcccccatgtcataggtggggcctagtgggaggtatgtgggtcatggggacagaaccctcatgaaagccttggtgctatgattgtagactttctgaggtcctcattagaagcagatgctgatgccatgattcttgtgcagcctgcagaaccataagccaaataaatctcttatctttataaattatccagtcttggtattggcaatgattgtttggatatgacaccaaaaacacaggcaataaaagcaaaattagacaaggaagaccatgttaaactaaaaaacttctgtgcagcaaagtaaataatcagcagagtcaaaaggcagcctatagaatgggagaaaataatttgcaacgcatatatctgataaagagttaatccccaaaatatataagaaactcctatatctcaatagaaaaaacaaacaaaaaaacacaccaaaaaccaaaccaaaaaaacagatatgcaaagaaatccaaataacccaattaaaaaatgagcaaatgaaaagatgtttctccaaagaagacatatgatttggccaacaggtatagaaaagatgcttaacatccctattcatcagagaaatgcaaatcaaatccacactgtgctatcacattatacctgctaggagagccattatgaaattttaaaaagaaaaagaagaaaaaaggaaataagcattagggaggatatggagaaactggaacccttgtgtgctattggtgggaatgttaaatggtgcagttgctatgaagaacagtatcaaatcaaaaaattaaacttagaactatgatgattcgccaaatcctacgcttggtatttgttcaaaaaaattgaaatcagcatcttgaagagatatctgcattcccatgtccattgcagcattgttcccaatatccatgagggggaaacaacctaaatgtctactgacagatgaatggataaagaaaatatggtataatgtatacataaaataaaatattaagcagtcattgaaaagaaggaaatcctgcaacatagatgaaccttgaggacattatgctaactgaaataagccagttacagaaggacaaatactgcataattcaatttatatgaggtatccaaaacagtcaaactaatagaagcagaaagtatagcggtggttgtcagtggacaggggggagagggacatggggcattgctgttcagttggtgttaagtttcagttatgtaagatttaaaagttctagatatctgctgtgaaatactgtgcttatagttaacaatattgtactgtgcacttaataagatagtagagctcatgttatgtgtttttcaccacaataaaaatatgaagattgttactagtttttactctaagcccagctgagatcttaccagatatatagcgacttgggttattcctaaagcgatcatccactagaataagagctccccaatcatttctgtgtctaatacatctagaaaaaatagggaaaaagtcaaataattataacatcggaaataaatccagttttccagtgggacagacagaaaattggaaaaaaatcaattttatagattcctttaaacaatttgttattatcagaaaagttacagaagctatccaacacaatgtaacaaactagatgtattaaaaattccctactttttccaaatacagataacttgcatccaaaatgttgtattttattttgcactcaagaaaattatagaaaatatattctaagatctttcttagccacatagactgttttcttttttttaccttaagtattataaataattgtaaaggtcctttttactagtttgatgagagttttaaatcatgaataaacatttaattttgtcaaaaatattctaaaattcaattgacataacatgtagtttttcttcttttgactgttaatatggtagattacactggttcattttcaaacactgaatcatccttgcattcctagtcatggtgtattattctttttatagattgttggattcaatttgctagtttaaaaaaacacattaaaaataaaaacatactttttaataattattaaacaattttaaagtgcacaatgcaatggtttgtggtatatttacaaggctgtataacctataccacttatctatcccagaacattttcaccaccccaaaaagaaaccctgtgcccactaattgttactccaaattatcccaattattccccattacctctggcaaccactaatctttctgtccttagagagttgccaattctggacatttcatttaacgggaatcagacaatatgtagcattttgtatctggcatatttcactgaacatgatgttttcaagattcactcatattgtatcatttctcagtacttcatttataagttaatgtttccactttttggctagtatgaataatgctgctattaaacatttgggtacaagtttttatatgaatacatgttttttattctcttgggcatacacctagaagtggaattggggagtcatatagtaattctatgtttaactttttcaaacactgccatactgttttccaaagcagctgcacattttacattcccaccacctacgtacaagggttccaaaatctccacatcctcaccatcatttgttattgtatacccttctaaaaatatatctaccctagaaagtgtgaaataatatttcattatggctttgatttgcatttccctaacaaccaatgatgttgaacatcattttttacgtgcttactggccatttgtgtatccttttttggagaagtctgttcaaattattggtccatttttaatggcccattttgtctttttattattaagttgtaagagttctttatatattctggatactagatcctgctacacatgatttacaaatattttctccatatgtgagttgtcttttccatttcttgatactgtcctttgaagaataaaaatttgaactgtaacaaagtccaatttatctgctttttctttggttgcttgtgcttctgatagcagatctaagaaactattgcctaatacaaggtcaagaaaatttatacctctgtttttgcctttttctgtctttgatccactttgagttaacttttgtatatggtgtgaggtaggagtctaatttcattatttgcacagatatccagttgtcccaacaccatctgttgaaaagactattctttctttgagttgtcttggcactcttgtcaaaaaccagttcactgtagatgtatgaatttgtttatggaccctcaattctacccattgatctatacatctgtctttatgccagtacaacatagtcttgattattgtagctttgtagtaagtttgaaatagaaaactgtttgttctcctagtatgttcttctttttcaagattgttttgactattctgggttccttgcttttccataataattttagaatcagcttctcaattcctgccagaaagtcagctgggattttgattagtattgtatttaacctctatatcaatataggggagtgttgatatcctaatgataagtcttctaatccatgaacgtgggattctttccatttatttagaattttctttcaataatgtcttgcagttttcagtatacagatctttcatctccttagttaagtatatttctaagtattttcttctttctgatgttattttaaatggtattttttaagttcatttttagatttttggctgctagtgaataaaaatgtcattgattttttaatattggtcttgtaacctgaaaccttgctgaacctatcagttctgttattttaaaaatggatttcttagaattttcttagaatgtaatatatcatttgcaaataaaaatagttctgcttcctcctttccaatctgtatacctttctttcttcttcttgtctcactgccctggttagaacctccaatacaatattgaatagaagtggtaagagtgaaaatcactgtcgtgatcttgaacttaggaaaaacatttcagtcttttaagattaagtatgatgttagctgtgagcttttaatagatgacctcattaaagctaagtaagtaaccttatattcccactttgttgagtattttcatcatgaaaatgtgttgaatactgttttatgctttttttttttttttgcatcttgagaagatcgtgtggttttagtcttcttttaatatggtgtattacattaattgattttataaagcatgttgaaccagtcttggattgctgggatcaatcttacttggtcatggtgtataatccttttagtatgttgctgattctgtcaatggcttttatttctatagtcatatgaaatattgctgtacaatcttcttttctcgtaatgtattttacttgttttagtatcaggtaatactggccacatagaatgagttggtaaatatttctctcccattttttgctagagttaatgaaagattaatgcaaattcttctgtaaatttttggtagaattcaccagtgaagccatttgatcatgaggctgaggcagaagaatcacttgaacctgggaggtagaggttgcagtgagctgagatcacgccactgcattccagcctgagtgacagagtgagactttgtctcacaaaaaaaaaaaaaaaaaggccaggcgtggtggctcatgcctgtaatcccagcactttgggaggccaaggtgggcagatcacgagatcaggagatcgataccatcctggctaacacggtgaaaccctgtctctactaaatatacaaaaaattagccgggtgtggtggcgggcacctgtagtccccagctactcgggaggctgaggcaggagaatggcgtgaacctgggaggtggagcttgcagtaagctgagattgcgccgctgtactccagcctgggcaacagatagagactctgtctcaaaaaaaaaaaaaaaaaagggggggggaagtgttttgatgacaaattctatctttacttgttatacatctattcagatattctatttcagctggtcgcagtggctcacacctgtaatcccagcagtttgggaggtggatcacgaggtcaggagttcaagatcagcctggccaacatagtgaaaccccgtctcttctaaaaatgcagccgggcatggtggcaggcacctgtaatcctagctactcaggaggctgagacaggagaattgcttgaacctgggaggcagaggttgcagtgagccgagatcatgccattgcactccagcccaggcaacagtgtgagactctgtctcaaaaaaaaaaaaaaaaaaaaaaaaaaaaaaaaaaagatattctatttcttcttgatatattctcagtattttgtgtctatctatgaatttgtccatttaatctaagttatttgtcatcacacaatttttgaaggtattctcttataatcctttgtatttctgtaaggtagtaacatcccctctttcatttctaattttagtgaattagaacttctctgtattttctttggtcagtcttggtacaggtctgtcaattttgttgatcttttcaacaaatcaacttttgttaccttggttattctctactgttctttgaattctctatttcatttatttcctttttcatttctagtatttcctttaattgcctcgctttgggtttagtttgctcttttttttttcctaattccttaaggaggaaggttagattattgattccagatgtttattcttttaaaatacagatgtttacagtattttttttttttagacagagtctcgctctgtcagccaggatggagtgcagtggcatgatctcagctcactgaaacctccgccccctgggctcaagcagttctcctgcctcagcctcccaagtagctgggattacaggcatgtactaccacacctggctaatttttgtatttttagtagagacggggtttcaccatgttggccaggctggtctcgaactcctgacctcaggtaatctgcccgtgttggcctcccaaagtgctaggattacacacgtgagccaccgtgcctggcctagatgtttacagcttttttaagtttccctgggagtagtactttcactgtgtccccaaaattttgggacattgtttccattttcatttatcacaatgtatttttcaatttttcttctgatttcttctttgacccactggttgtttaaaagtatatcattgaatttccatgtatttgtgagttttccatttttcctcccattattgatttctggtttatttcattgtagtcagaaataatacttgtaatgatttcaacctcttaacatttatggaaccttatattttatggatgaacggatggcctatcctgaagaacatgccatgttcacttgagcagaatgcgtattttcctgttgttgggtgaagtgtgctacagatgtctgttaggtttgtttgtagttgttggtttgtagttttgttcaaggcttttattttctgttgattttccttctagttgttctacccattattgagcagggtatggaagtctccaagtattactaaattattgatttctgatgctttttgctagatgtgttttggggcctttttgttaactttgtatgtttataattgcatatttagacttgttatttttttttattttttatttttatttttttttgagacagggtcttactccagttgcccaggctggagtgaagtagtgaggtcatggcttactgcagcctcaacttcctgggctcaggtgattctcccacatcagtctcctgaatagctgggattataggcacatgccactacacctggctaatttttttgtacttttagtagagacagggtttcatcatgttacctaggctagtcttgaactcctaagctcaagcgatctgcccacctcagcctcccaaagtgctgggattgcaggcagaatggcacttttatcattataaaatgttaattgtttctattaacttttttttgtcttaagggtctattttatctgatattagtataaccaaaccagctctcttttgtttactatttgcatggtatgtcttttcccatcattttattttcaacctatttgtgttttttaaactagtgtttctcttgcagacagcatatatcacattgttttcaatccattcagccaaactttgcctttagattggagtatttaatccatttacatttaatgtaattactgataaggtaggatttactcagctattttgtaaaatactcactttgctatttgctttctatatgccttacgtattttgttcttctgtctttccattactttccattttctccaatagacactttccagtatataattttaattctcttgtcatttacattactatattttcttatttttattagtggttgaagagtataataaacatatcaaccagtaataaactagtcaggaaaattgccaacttaatttcaatagtacaaaaaaatggtccttctgttccctcatctgtcacctttgggttgttattgtcatataaattatatctttaaacattgtatgctggtgcagaagaattaacattgtaggttggattgtttacccctagaaaggtctgtttaaaggtgttcctgggctgatgaatgaaaacttagattcaggagggtacctgtgattgactgataagagtgtctcactgtgcctgaactgtttgagtaaacaatatattaatgctgaatactcattctccttttgagagtctagtcttctggaaactgctaggcagaggctgcctatatgaccagccccagtaaaatccctgggtgctaatgagttcctctgattggaaatatttgacacatgttgccacaactcattgctcggggaagtgtgtcctgtgtaactgcactgggagaggacacttggaagcttaagactggctccctagactttgtcccatgcacatgttttgttctctttgctgactgtgcttggtgtcgtttcactgtaataaatcctagccatgtatacagttatatcctgaggctatctaactgttccaagtgaattgctgaacctgaaggtggtcttggcaacccacaagacaatcaccacagatttacaattattgttttatgcagttgctcttttaaaaaatcaagagtaaaagaattataagcaagaagtacctttatattaacttttacatttacgtatgtcgttaactttgtgggtattctttatttcatcgtgtgcatctgacttacttcctaatatcctttcatttcagcctgaaagactccttttagtatttctcgtaggacaagtttgctacagagtaattctcttggtttttgtttatttgggaatgtcttaatttttaccttatttctgaaggacagttttgttagatatagtattcttggttgacagtcattttctttcagcactttgaacatgtcaattaactgcttcctggtctggaggatgttttgtatatgatgagttatttctctcttgccgctttctagattctgtcttctggctgtttgatttcaaccatctagataggaatctccctgagttcatcctacttggagttcgcttatcttcttggatgtataaattaacgtttttcatcaaattcggaacgttttcagccataatttctttaaatattctttctattcttttttctctcctctccttctgggactccaaatatgcatatgttggtacgcttgatgaggttttacaggtctctgagattatgctagttgttcttcattctttttctttctgttcttcagagtaaataatctcaattgatgtttaagtaaatcaattctttcttctgccttcttaaatctgctgttgggcccctgtaatgaatatttcattttagctattatactttccaactccagaatttccattaggtttttgttaagcaaattttatctctttattgatattccctatttagtgaggtgagacatcattctcacagtttttgacacagtttgcttagttattgaatgtatttgaactagctttctctcctaaggcatagctttgtctactaagacaaatgtctgggtttcctcagggagagtttctattatttttttctcttagttatactttctttgttatgtgtcatgatttttgttgaaaacagtacattttaaataatataatgtggcaaatatagaaatcggattattctccctcttcaaggttttttgttcttgtaatttttctaaaataatcttgtaaagtctgtattgtcatgtgtggtcattgaagactgctcgattaacttagtagtcagctaataattagacagagatttccttaaatgtctagaaccatcatgtctcccattctttgccaagagtctctgcatatattggggcataatttcaatcctcagcactgtaggtaataactctgatcttgttttcacttcctgcttcagcagagcaccaaggtgatagcttagggccttttcaggtcttttcttagcatgtccacatcactggtcacatgcactctcctacacatatgcatggcccactaaaatcccaggaatatgtcagaactttaaaagctctctatggacattgcattcctcagcttttctctttacattttttggctagcctctcacttgccccaaatgtcattcattgtctcaggcaactgtgaagttaaacagctggctgggtgagctctgagtcaggtcaaataaagatagccttgtgagtggggtcttccaggaaactcccaggtaggtcacataattctctggaaatgtactccagacctgttttgctccctccaatgactgtcaggttgttggctttcctcacgatttcaggctattggtttttaaggctattgtgaacttggagagaggtgagaacagagcaagttaaaataccacaaagcttactgttcttactgcaattcagctatttttaaggagtaaattcttcctagaatgctgtaacttttggttaatacccagagttttgataaagttgcttctaacttatttttgcctattttctcattgcttttagaaatttcagaggtctttgttctgccatttttgaggaccttacccaatttgctggcactctgttgaggacatcttcatctatgtttcagagggatattgatctatagttgttgttgttgttgttgttgttttaacttttattttagtttcaggaatacatgtgcaggtttgttatagaggcagattgcatgtcatggtgatttgttgtgacaaattaggaccgattattttgtcacccaggtaaaaagcagcatagtatccaacaggtagttttccttgaatggtagctcaactcttagttcaaacagcttaattttaagctctccaccctcaagtaggccctggtgtctgttgttcccttctctgtccacatatactcaatgtttagctcccgtgtataagtgagaacatgtggtatttggttttctgttcctccgttagttcatttagaataatggcttccagctccatccatgttgctgcaaaggacatgatcttactcttttttatggttacatagtattccattgtgtatatgtaccacattttcttaatccagtctactatcaataggcatttaggttgattccacgtctttgctactgtgaatagtgctgtgataaacatacagatacatatgtctttatgggagaatgactcacattcctttgggtatacacccaataatggaattgttgggttgaacagtacttctgctttaacttctttcagaaatcaacaaactgctttccacagtggctgaactaatttacattcccaccagcagtacatatgtggtcctttttctctgtaaccttgcgagcatctgttctttttttttttttttttttgactttttaacgatagccattctgactagtgcgagatgttatctcattgtgtatgtatgtgtttttttgtttttgtttgtttgtttgttttgagacagagtctcactctattgcccaggctgaagtgcagtggcacaatcccaactcactgcaaactccacctcccgggttcaaacgattctcctgcttagcctcccaagtagctggaattacaggtgtgcgccacaacacccacctaatttttgtatttttagtagagatggggttttgccatgttgggcagagtggtcttcaactcctgacctcaagtgacctgcccgccttgacctcccagtgctgagattataggcgtgagccaccacgcccagccacattgtggttttgatttgcatttctctaatgatagtgtgttgaacattttttcatatgcttcttggccacatgcatgtctccttttgagaaatgtctgttcatgtcctttggccactttttaatggggttgttttttgcttgtcaatttaagttccttatggattctggatattagacgtttgtaagatgcatagtttgcaaacattttctcgcattctgtggtttgtctttactctgctgatagtttcttttgctgtgcagaagctcttaagtttaattaagtcccattcgtcgattttgtttttgttgcaattgcttttggtgtcttcatgatgaaatctttgctagagcctatgtccagaatgatatttcctaggttttcttcaagggtttttagtttaaggttttacatttaagtctttaattcaccctgaggtggttgttgtatatagtgtaaggaagggggtccagtttcaatcttctgcttacggctagccagttaggtcccacttgtcaatttttgttttgttgcaattgcttttgaggacttagtcacaaattctttgccaaatctgatgtttagaacagtatttcctaggttttcttctaggatttttatagtttgaggtcttacacttaaatctttaatccatcttgagttaattttaatccatcttgagttgatttttgtatatggtaaaaggtagggggtgcagtttcattcttttgcatacagcaagccagttactccagcaccatttattgaacaaggagtcctttccccattgtttatttttgctaattttgtcaaagatcagatggttgtaggtgtgcagttttatttttaggctcttatagttttcttttttcccccttttccttttgtttttgtagtcttcatctggtttggttgctggttaattctggtctcataaaataaattgggaaggattgcatcttctgttttttagaagagattatgtaaaatttgtgttatttcttctttaaatgtttggtaatatttgctagtgaacacagctgggtgaattttttagaaggcttttaactattaattctatttctttgctagatagctatgcgtgttatctgtttcatcttggcctcataaaataaattgagaaggattacatcttctattttttagaagagatcttgtaaaatttatgttatttcttctttaaatgtttggtaatatttgttaatgaacacatctgggtggagaattttttagaaggcttttaactatgaattctatttatttgctagatagctattcatgttatctatttcatcttgggtgaattttggtattttgtgggttttgtggaattaatctacttcatctaagttatcaaatgtatatgtatagagtttttcgtagtattctcatattattcttttaatgcctgtggagtctgtagttatactattaatacctcttttattcctgatattagtaactgtggcttctcttttttttctttgttaattttgctagaggtttatcaattttattgatcttttcaaagagtctatttttttctgtttttcaacttttattttattttagattccaggagtacatgtgcaggtttgttacaaaggtatattgcatgatgttgagtttggagtacaattgaacctgttacccagaaagcaagcatagaacacaataggtagtttttcaacccttgcttccctccttctctgcctccacttacattcattccctagtgtctatgttcccatctttaagtccatgtgtacccattgtttatctcccatttataagtgggaacatatggtatttggttttctgtttctgtgttagtttgcttaggataatggcctccagttgcatccatgttgcggcaaggacatgatttcattcttttttaatggctgtgcagtattccacggtgtatatgtaccacattttctttatctagtccaccgttgataggtatttgagttgcttctatgcctttgcttttgtgaattgtgctgtgatgaacacacagctgcatgtgtctttttggcagaatgatttattttcctttgggcatataaccagtaatgggattgctgagttgaatggtagctcaactcttagttcaagcagcttaattttcatttcactgatttcattatttttgttacaattcatcaatttatacttgtttttattactcctttttttcctgtttgcctcacatttatttagctcttctttttctagcttcataaggtagaaactaagatcaatgatttgaggatgttttttcctaaaataagcatttaatgacataaatatccatctgagcactgctttagctgcagtccttacattttgatatgctgtattttcatttttgatcagttcaaaatattttctaattttacttgaaacttgctgttttgcctgtggattatttagaaatatgctgcttaatttccaagtatttggacatttttctgttattgatttctagtttaaactagattactagtttaattccattacagtcagagaacatactggacttgagttggctaataatgttgctcaagtcatctatatctttattagtttgtctactagttctgttattgagaggaattttgaagtttccaagtataattgtgtatttttctatttttctcttcagatctgtcagtttttgcttcatgtattttgaaaccctgttttggggtgcatacacatttatgattcttatgtcttcttggtgaattcacccttttatcattatgtaatgttctcttttatccctaattttgtttgcttggaattctactttatctggtattatacagttacttgagctagatcattggtattttgaattctggtctcctttcttaatctacctgctagtgttgacttttcagagttctcaaacagctactccacatattctgtctaggttttttagactactaaatatgcttacttcatcttttctaggactgaaacgcccaaactattttttaaagttaattttagctttgtaaattttaacttttatcaaagaaacacgaacacatagttttatgttttcaatgaaaaacataactgtcctttccctacccacctcctgtttacaattcccattcctcagaaacaattactttcaatattttaggtagatcttctggttatttatctccatatttctaaggaacattgatcctactactacttcttggtttttgaactttagaacttacgtactgattctctcctgtggaagatgtttatttctcttataccactgatacttcaccatcccttcctgggaatattaacaactgagtcacatagtgcactataattagatttcctttattgtacaagactttttgccttccctggagttaataactgcctcttctttttgtggattaatttttaatgttttctgtcattaattaatccccaaaccatgccatagctgtaaaaattcttccaagtatggtcaaaccttctatcctctgaactcaatttagactacttgctgcactgttatcattccagagttttccttcctggttgttttaggaattatctttgcctctattctggattggaaccctagttccctgcatccttgatattcctttttaaattttttttttttattttgatggagcacatcttccagtaacatcctgagaaagtgtccatttgaagcaaatgttttaggtccttgtatgttgaaggctttattttgtcttatagtttattgatagtttggctcatgtagaacttaagttacaaatcaaaaatttccctaaaatatttgaagacaatttcttctatttttttggtttcagtgttgcttttcagaagtctgttatgattctgattctctatcttttgtaagatagagacctgtctttttgtctttggaagattttaagactttttctttatccccggtacttggaaagggcacagtgaagtgctttgtagcttttcctcctttacctgtgcctgagtgagccccttcaaccaagaaatcgtgttactcaattctgagaaattttcttgagttatttctttgagatgtttctttcctttattttttctgttctcatgatctgagccttctatgtatcagaagttggttattgcatactgatcctctaattttctagttcttctttcctgctttctctttttgatctggaaaatttccattttatcttccaagccctattatgcatttaaaaattgttggtatcatgttaatttctaagcactttttcttattcttttgttcttgtttcatggaggcaatatggtacatctctatggatattaagatttttttttgaagatttctcctatctgggggttggcaaactatagcctatagtgcctacaaaaatagcccatgtcttgtttttgtacagcctccaatgtgtaggaatggtcttcacatttttttttttttttgagaaggagtctcattctgtcgcccaggctgaagtgcagtggtgcaatctcggctcactgcaacctccgcctcccaggttcaagtgattctcctgcctcagcctcctgagtagctgggattacaggcgtgcgccaccatacctggctaatttttgtatttttagtagagatggggtttcaccatgttggccaggctggtctcaaactgctgacctcaagtgatcatttttaagaggattaaggaaaaaacaaaaaatatgtgacagagactgtatgtagcctgcaaagcctaaaatatacacaatagtcccccacagccacaatcttgcctatggtcaaagttactcacggtcaaatgtagtccaaaaatattaaatggaaaattccagaaataattcatacatttaaaaatgcatgcccttctgagttgcatgataaaaatctcatgctgtcccactcaggatgttaatcatccctttgtccaccatgtccatgctgtatactctttttgcccattagtcacttagtagccatcttggttatcagatagaaaaaacatagtatacgtagagtttggtactatccatggtttcaggcatttagtggaggttgtggaatctatcttctgtggataaggagagactactgtactgtctggccctttatagaaaacactggccaatccttgttctagtctgttgtgttgtttctattttctcagagttcttctgctgtgtttttgtttgctttgttggacttgttttgttgttgttgttttggtctgtttttcatgttacagactttctttgacaatctggtgaagactctgcacttacttaagagtaaggcactaaaacactgattggcagctctgaatgtatgggtagagcttataggctgggaagtttgctatagggtaatttggcaggaactgggccaatttgtagatattttctcatggggtggtcagtttccctaaaaaggaattctacacgcttggtagatgtaagactgattgtcagcctactcagagctgaaaagaaaaggggggtggagttctcacattcagtatgtaaaatccccgtatataatattaacctccatctttaatacgtcctcagctgtgcctggtgttgaagaatacagagtctctgttgttcaacctttccagaagtaaacctgggtgagggaggaggctaattgtttcttatactaatttgcaaccaagccacctgtttttaaaccttactttcattgacattttagattgctccaaatcctaggctttttcatgcataaatctgaaagtgcttgttgactatcatcaatgtagatttaaatttcagctttctcttgcctgctaagtcattcagtcattcggctgttttccagtgttcaaaatgtgttgatatcgcttgtctgtcactgtctcctctctctctttgtaatattgtaggtttgacattttcatttctttattatcataggattttgagggggtgaagagtaacataaatgttcaatttttctacaaagacaaaaaaaatctaaattttatagggcattattttttgatattattttaaagtaacctataggctccaaggcaacagaccataacactgggaaggataggaagaagattaatattgtcaatactacagaagagtattgaaagtcaatggaaagtcagtgtgccactgtattttggttccagtttgatttatgtttaaagcattctatggtatggtagaaaggtatttctgttaatgaaacaattcaaagaaaaaagatttcaccttttctttttaccattgttttcaaactgccttgcttaaatgaattatgccggcttgagacaaagattatactttcagtaaagcaacaaagactagttagaaaactcatagtgcagttgtaacctggttgcaaaaccatcttgtatgtttccaaaggctgttcttgtatttcatagacttatattacttcaaatactctaacagtcccatgtgtgcttaaaaaaattaacattaaaaggaatccattggtttctgcttactttagatcttctgtatcccttacaagaagagtgcctcagagtataagcaccttttctgtcaatcaatatacattatgagttttattaaataacataaaacatttgcttggtctttatttttttaatttaaaaaattttacttattgattggttttaaagggtaagttcctttgtaacaaattattaattattgacattattccctgaaaatcagtaaaatgatagctgggctctccatttaaaaaaattaataaaattctaaaagtacagtattatatatcaatactataaatacatgatttttatgatattccaggaaagcatgttttgaagctctaaaagctctctgggcaatgttgtatggcaggaaaaagcactgaacctcacatttttcactaattcaacaagcatttgagacttagttggttgctgagaatgtaacaacgtaacacatgttcaaggaagaaaacagataggctattacaatacaatgagatatgtgctataatacagatagcaaccaaaatgctataggtttactaaggtataaataactctagttggagaagttttaaaggtcctcataaaggacatgactttcaatgaggttttgattgctaaatttgccaaacgaattgtatgataacttataagccaaggcaaagcataatgaaagaatatagcatgtttgatagtttaatactgacatacttatgtttaatagtgaaaaattcggtggctagaggtagaggataaggatgaaaaagcaggtattacagttttagaaatggatgggaacaagatgtaaagggccatttagtagccatgtggccttagaaaaataatttaatttctcacaaccagtttaaaaacaattcaggctgaggcaggtggatcatctgaggtcaggagtttgagaccagcctgtccatcatggtgaaaccccgtctctactaaaaatataaaaattagctgggcatggtagtgcgtgcctgtaatctcagctactcaagaggttgaggcaggagaatcgcttgaacttgggtggaggaagatgcagtgagccaagactgcaccactgcactgggcgacagagcgagactccatctcaaaaaaaaaaaaaaaacaaacccaaaaaaacccaaacaaacaaacaaaaacaaagcaaatcaaataaaacatcaagtagcaacatgcattgctactggaagtgattggtagaagaatcaaatgagataatatatgtggagaaggtttgtaaacgagaaaaccacatacaaatatgacttctgtttcacatggtttcttgaaattcaaggcattgcttatactaaaaggaagaaaaaaatcaactgagctaagaatacttattttccgcaaattgagtataatgactaaaagtcaacaatttcaaaaatatattcaagcgcccctagaaactattagctgaatattaaaattcaaaaaaaaaatgtcaatcagcagggagacacaaagtaagcagatgtgatgcttcaataaccttcagtgcaacttgattccaagtaaaatgggatttctagggaaaaaaggggagcaggatctctgtagcttaaccatagacctgaatcactcagtttgaagaaaaacacatgcagaataccattctaaaatgatggggagtggctgggtgtggtggctcacgcctgtaatcttaacactttgggagcctgaagcaggaggatcacttgaggccaggagttcaagaccagcctggccaacatagcgaaacccgtctctactaaaaatacaaaaattagccaggcgtggtggcatgtgcctgtaatcccagctactcaggaggttgaggtaggagaatcgcttgaacctgggaggtagaggttgcagtgaactgagatcgcaccactgctctccagcctgggaaacagagcaagactctctcaaaaaaaaaataataataataataaaaacaaaaataaaaaataaaatgatggggagtacagtgggtgacatgttctagggcttaaatctagttgttgtagtcttatgtctaagctatacacaaatacacatagcttatgtatttgtatatatatacatatagctatgtctaagcgatacacaaatctgaacccacatgccatctggtttacaaatgggctaatgtaaatacacaagacaccagaaaaataaaaattttttatttgactggttaagattatgattagttgtgggacttctggttgaagtgcaaatatgtcaactgatcatgttttcatgattttactcttaaccaatttcttttttttagatggagtctccctctgttgcccaggctggagtgcagtggcgcaatcttagctcaacgcaacctccacctaccaggttcaagcaattctcctgcctcagcctccccagtagctgggactacagacacacaccaccatgcccagctaatttttgtatttttagtagagacggggtttcaccacgttgaccaggctgatctcaaactcctgacctcaggtgatccacccgcctccacctaccaaagggctgggattacaggcatgagccacctcacctggcccaacctgtttctatgaattatccaaatgccttacagcttcactaggaaataaataattacatggtgaagttaattaaaatttcatagagaatataaaatattaatttgtgggccgaatgtggtggctcacgcctgtaattccagcactttgggaggccaaggcaggcggatcacaaggtcaagaaatcgagaccatcctggccaacatggtgaaaccccatctctactaagaatacaaaaattagccaggcgtggtggtgcgagcctgtagtgccagctacttgggaggctgaggcaggagaattgcttgaacgcaggaggcagaggttgcagtgagctgagattgtgccactgcactccagcctggctacagagcgagacttcatctcaaaaaaaaaaaaaaaaatttaatttgcacaaaacctaattatagcatttacaaattagatgttgatgccctacaatatgaaattaagggatagtaatgcaccacataatgatgtttcagtcagtgtgaagtgcatatatgatagtggtcccataagattataatggagctgaaaaattcctatcacctagtgatgtcaccattgtaacattatagcacaatgcattacaagtgcttgtggcgatgctggtgtaaacaaacctactgtgctgctagtcttataaaagtatagcacatacaattatgtatggtatataatacttgataatgataataactgtgttactggtttgtgtatttactatactgtacttcttatcactacagtgtactcctttcacttacattaaaaaaaaagttaactataaaacagcttcaggcagatccctcaggaagaattccagaagaaggcattgttatcacaggagatgacagctccatgcatgttatttattggtcctgaagaccttccagtgattcaagacatggaggtagaagacagggatattaatgctcctgatcctgtgtaggcctaggatactacatgagtgtttatgtcttcatttttttttttttttgagatggagtctcgctctgtcgcccaggctggagtgcagtggggtgatctcggctcactgcagcctccacctcccgggttcaagtaattctcctgccccagcctcccaagtagctgggattataggcacctgccaccacatccagctaatttttgtagttttagtagagatggggtttcaccacgttggccaggttgctatcgaactcctgaccttaagtgatctgcccaccttggcctcccaaagtgctggattacaggcttcagctattgcgctccccatgtcttcatttttaacagaaaagtttaaaaagtaaaaaaataaaaaataaaaatttcaaaaatagaaaaagcttatagaataaggatataaaaattatttttgtacagctgtataatttgtgttttaagctaagtgttgtaaaagagtcaaaaaggtaaaaaaaaagataaaaagataaaaagtttataaagtaaaaaagttacagcaagctgggcacagtggcgtgtgcctggagttccagctacttgggaggctaaggtgagaggactgcttgaacccaggtgttcgagaccagcctgggcaacatagccatacctcatctctcaaaaagaaaaagtcagaataagctcagggtaatttattattgaaaaaataaaaataaataaatttagtatagcctaagtgtacagtgtttataaagcctacagttagtgtacagtaatgtcctaggccttcacattcactcactacttgatcgactcactcagagcaacttatagtcctgtaagctctattcgtggtaagtgccatatacatttgtaccatttttaatatactgtatttctataccatatctttactgtactttttctacacttatatactcaattacttatccttgtgttacaattgtctatagtacagtaacatgctgtataggtttgtgatctaggaacaataggctatatcatatagcctatatgtgtagtagactatactatctagatttgtgtaagtacattttataatgttcccacaacaatacaattgcctaacaactcacttctcagaatatatccgttattaagtgatgcatgactgtataaaataatgatttaaaaatgagtctcacaaagcacaaatcttaatgggcaagaatatttagaagtcggagtatcatgattaaatgtttagttggtgttaattctttaggatcacgattatagtttgttttaacccttcttcaatgatttgctaatttttttttttttttttttgagacatggtctggctctgttgcccaggctggaatgcagtggcatgattttggctcactgcaacccccacctcccaggctcaagcgatcctcctacctcagcctcccgagtagctcacatctgtaatcccagcactttgggaagctgacgtgagtggatcacttgaggccaggagttccagaccagcctggccaacatagtgaaaccccatctctactaaaaatacaaaaattagctgggcatggtggcgcacgcctgtaatcccagctactcaggaggctgaggcaggagaattgcttgaacctgggcggtggaggatgcagtgagccgatatcacgccactgcactccagcctgggcaacacagtgaggctgtctaaaacaataataataataataataattaattattttattttttctttaattattaaatatccttcagtttcaatgttatccttcaacattatcactatacataaaaggcacaagaaaatatagattgtaatcacattgttatctaaagcttacaaataacattaaaatgaaaatgatttttttttctgtcagatgtcttctttacatagaagcagaatgaaaaattgtgcaactacagaagctcactgggcagtaaaatagattttgtttctatttgatgatattttaacagatacacagattccgtactgaaagtacactttcaaatagaatatctcctcacactggctggtatatcaattttcttccctgacattttgggggaggtgaggagagaggtctgtttatctataaaattgttatctgagctttgatgttcacaagacaaaacttttttgatttgataagctttctttaatatttactgagcatctttgtgtgctattcattgttagatcaatcacaaaatttctttaaactttagcaaattgtgagttttgttttgggaataacttattcttcttactcttttcaaattctacttgtgacagctatcattgaatacataccagttcctatggttccagttaaataaaattttaccaagtttattataaagagtaaagtagcaagactagatttatatatatagccctgtcacagataatattatattaaatttcactccacttacctaccaagggcctggtttaaggccctgtatgcttgaatttcataccactgacggccaggtagaagacctctcaattttgaatggtggtcattgtattgtcgttttagttcaacctaataattttaaaatatatttaaaaaattagtagataattaaagctcattttaaacatcatattaacttctaacagtttgaatatacatatttttagggtagagattttattttgtttttcagtactgatttttttcgtttcatttaaaatagttttatttagcttcacattccttaaattacctaatgcatataactaatcagctgtgtgatctcaagcagttttattgaacttacattcattaaatccacacaattttcagtgtacaagtaggtgagttttgacatatatagtaatgtaaccaccatcataatatagaacattttcatcacccccaaaagttccctcttatccctttatagtaaatttctttcttccactgctggccctggcaaccactgatctgctttctgttttgccctttatagaatttcatataaatattatcatatactatgtaatgacttgtgacatttttcatttaatatacttttagaattcattcatgttgaaaggtttatgagtagttcattcttttacgtttatccagtctggtaatctctgctttttaattgcaatgtttagaccatttacatttaatgtagttattgttatgattgggtttaagactaccaccttgcttcccccctacccccccaatctgtaccattttgtttttatcttttggatcaatcaagttcccccctccccccatattatttccactactggaaataatatgcttccatattatttccactactggattattagctatgtctttgtgtgtgtgtgactcctctagggtttatgatatacatccttattagtctaccttaaaataatattttaccacttcacatatgatgtaaaaacaataccacaatatacttccatttccttttattgtcctttatgctattgctgccatacattttagttttatacatgctataaacccataaaacattttgattatgctttaaacagtacattatcttttaattttaaataagtttataattttgaaataagtttagatttacagaaaagttccaaagatagtacagagattccttataccctttacccaatttcccctaatgttaacatcttatattactatagctcatgtcaaattaagaaattaacattagtacattagtattaaataatctatgtattttattcagatttctgttttgtcccaaaagattatcttttaaaatataccgtatttacccacagatttaccatttctggcactcttcattttctcacgtagatttaaatttccatctggtatcattttccttctacctgaagaactttctttaatattagtagtgcacgtttgctagcaatgagttctttcaacttttctttttctgaaaagacttcactatcttcatttttaagagattgtcccacttgatcaagaattctaaattgacaggttttttcttttgttaaagacggcttttcattgttttctgatttgcatagttctgaagaaaaaatatgctattgtcctatctctgtaatgttcccctttcttttagcgactttggattggattacagtgtgctgttgtgtgtattttgcttgcgtttttattaagcttcttggacctgtgggcttatagtttctatcaaacttgaaaaattttcagccattatttctctaaatatatatattattctgcctcgaaactcttcttcttagactccaattacaactatattagactactttatattactccacatgtcactgaccctcttttttttcactctacacttcattttggataatttttatttataagatttcaagttcaccaaattttccttctgcagtgtctaatccatccagtgtattttttgtttcatatagagagatttcacataggtatttaaaaaatagcttctgtttctcttttcagtatgcttatgttttctgctatcttctttgaacttacagagcataaaacataagatattttaaaaatccttgtctgctagccagttctaacatctctgtcatttctggttttgtttctattgattgattttcctctgtattatgggttaaattctcttctttgcatgcctgctaatttttgattggatactagacattgtgggcattaagtcagtggttactggattttgctgtgaatgcaattagggtacttggaaccagttcattctttggcagctttgttagggaaagtcaagagcagcctttagtctagggctaatttatcccccatacaaaggtgaaactctactgatgattgtttcaagtaccccatgtgttatgaagtttttctcttctggctgctgggaactcaaactattcccagactttgtaagcactaggaagttttctgcctactcatttccctggccttatgtagcttcctctcatgtatatgccaatcagtacttgaccaaaaacttaaggggacgcctatgcagatacctggagctttctctctatgtagctccatcctctctagtactctaccttgcaaattctagctgccacggactttccctaaactttatctctttaactcagtgtgaccactgagctctgtttgagtttattctccctgaactgtggcctagtaattgtctccaggtaataatctggtgcaattgtagtattccaggacaagtatatcaaatggtacagttgtcccttggtatccatgggtgactggtttcagaacttccctcagataccaaaatccatggatgctcaagtacttgatacaaaatgacttagtatttgcataacctatgcatatcctcctttatactttaaataatctctggattactttaatagctaatatgatgtaaagctatgcaaatagttgttacattgtagtgtttagggaataatgacaagaaaaaaatctgtacatgttcagtacagaagcaattttttttcaaatatttttgattcacacttaggtgaatccacagatgcagaacccataaatacagagggccagttgtgtatttttgtagtagaagcctaaataaagatatgtggagttactttcttgaaggaaatcattatattgaagagacattgccccccccccatgtttattgcagcactattctcaataaccaagatatggaatcaacctaggtatccaacaacagataagtggataaagaaaatgtggtatatatacacaatggaatactaaacagtcataaaaatgaatgaaatcctgttattcacggcaacatggatggaactgaggacactaccttaagtgaaataaataaaaaacataaagttaaacaccacatgttcttgctcatatgtggaagcttaaaaatgttaatctcggccaggcacggtggctcaggcctgtaatcccagcactttgggaagctgaggcgggtggatcacaaggtcaggagatcaagaccatcctggctaacacggtgaaatcccgtctttactaaaaatacaaaaaaattagccaggtgtggtggcaggcgcctgtagtcccagctactcgggaggctgaggcagaagaatggcatgaacccaggaggcggaggttgcagtgagccaagatcgcaccactgcactccagcctgggtgacagagtgagactctgtctcggaaaaaaaaaaaaaggttaatctcataaaaataaaaagtagaacagaggatactagcagatgggaaggggagaaggaagggagggatggggagatatttgttttttgtcttgtttttttgagagacagggcctcagtctgtcccccagactggacggcagtggtgcgatcatggcttacttcagccttgacctcctgggctcaagtgattctcccacctcagcctcccaagtaggttggactacaggtgtgtgctgccatgcctggccaatttttttcttttttaatttttatagagatggattcttgctatgttgcctatgatggtctccaactcataagctcaagaaaacctcccaccttgacctcccaaagtgctaggaatacaggcatgagccactgcgtctggctgagatttgttaaaggatataaagttacagctagatagaaggaataagttctaatcttttataccacagtaggatgactatagttaacaatattacatcatttcaaataactagaaggaggagattacatgttccatacacaaagaaatgataaatgtttgagatgacagatacgctaattaccctgatctaatcaataaacatcatatgtatcaaaacatcactatgtaccctatgaatatgtacaataattatctgtcaactaaaaaataaaataaagagtaaacttcttggaaacattttaggctttcaagatatattaacaaaacttatacagcagttccctcttatctgcagtggtttaagttaactgcggtcaactgtggtccaaaaatattaaataaaaaattccagaaataatttatgttttaaattgcccactgttctgagtagcatgatgacatctcatgctatatcctgctccatcccactcagatgtgaatcatccctttgtccagtatatccatgctgtacatactacccaccagcagttagtagttacttagtagctgtctaggtctaatcgagtgtcatggtattgcagtgcttaggttcaagtgacctctattttacttaataatactttactaaattgtaaacctactcaagaaaaaacaaagtattttccgtgtactctataacactgttaactttttcttttttttttgagacagagtctcgctccattgcccaggctggagtgcagtgacatgatcttggctcactgcaacctccgcctcccaggttcaagcagttctcctctcagcctcccaagtagctgggactacaggcggccgccaccatgcctagctaatttttgtatttttagtagagttgggatttcacattgttggtcaggctggtctcaaacgcctgacctcaggtgatccacctgcattggcctcccaaaatgctgggattacaggcgtgagccactgtgcccagccactattaacctttttaaataaaagaacatgctttaggaaagaaaacagaacagtacacttctgaaaagcagctttcaaattgggaggtcaaaaaattttatcttactgtaaaaataaaatctaagctttttttttttttttttttttaacacggagtcttgctctgtcaccaggccggagtgcagtggcgcgatcttggctcactgcaacctctgcctcccaagttcaagagattctcctgcctcagcctcccgagtagctgagactacaggcgtgtgccaccacgcccagctaattttttgtatttttagtagagacaaggtttcaccatgttgaccaggatggtctcgatctcttgacctcgtgatccacccgcctcggcctcccaaagtgctgggattacgggcgtgagccactgtgcctggccaaaatctaaaaacccaaaaccccaccctttttattttacattccctcaaaagaatctgtcaaatttctaaaatgaaactttacaactagaatataaaggacatataaaggacatagactttgccttttttttttttttttttttttttggacagagtaccgctcagtcacccaggctgaagtgcagtggtgcgatctcagctcactgcaacctccacctcctgggttgaagtgattctcctgcttcagcctcccacgtagctgggattacaggtgcacgccaccatgcccagctaattttttgtgtatatatatattttttgtttgtttgtttgttttttagtaaaaacagggtttcaccatgttggctaggctggtctcgaactcctgatctcaggtgatctgcccacctcaacctcccaaagtgctgggattacaggtgtgagccaccacgcctagccaactttgctttttttttttttctttttttttgagacggagtcttgctcaatcacccaggctggagtacggtggcatgatctcggctcactgcaacttctgcctcttgggttcaagtgattctcctgcctcagcctcctgagtagctgggactacaggtgcatgccaccatgcccagctattcttttgtatttttagtagagaggggggtttcactgtgttagccaggtgatcttgatctccagacctggtgatccctctgcctcggcttcccaaagggctgagattacaggcatggagccactgcccccagcccaactttgctttttagggcaacataagtagtaaatgataacataacaccatagtaaatattagatgatatgttaataccctccctggaaattcagcaataaagcacatgataattaagactataagaaaaagtacttttaaaattctgtccagctgggaaaaatatatgtatttcctacctatctctcaaaaatgtaactaaagcagcttctcttctttaacaatattttcctcaaagaaagttgacatctactttgtcagacataatagcttatgtgttttcaaaatttcctacaccatggacagactgatacattatagtggtcactgttccgaagacaacagttgctctaggacgtattagttataaatggaatatttagagtgaatgtagcaactattagattaaataaaattatgactccttggtcttctatttttcattaacataattaaaattttctgtatggctacattgttttaatttattgcaaattttcaaacaccttttacactccaaatggcctttaaaatactgccaatattttacccaggggaatttattttagataaaaagtttaaaaacctacaaaagaacaaaaaactcccaaacaaaaaacaaaaccctgaaatgaactgtatataaaggttaactttgaaatagttcttattacataaacagatttttaaaattaatcaataataaaaattactttgtgagatcacagttaattggaaaaagcaaaactaagggttaagaaaaggtggaaagtgagtacacctcattttaatgacatcagaatctatttcattgtacacttagggattatcaagcatgaaaatcaatgaccaatttaaaatgacatacagcatatgtgaaaaagccagtttctcctgccagcaaatagcctaaatgttaagtaaaccaaaggctggaagggattagttgaaatgtcaaaagacaaccttttacttttacctgctcatccttataaacacattcttatctctcaggcatgctttccaaacaaatagtttcaatgtgcaccaccagcaaaaggcccaaggcaagctctgccatcttgtaactgtcaaagagattagtctttgatctatttgggaggtcatgcccacattcacattaccttataatctaacaacattatacctgttgaccaatgcttccttaatgcctaatgagacagacattttacattatggaagttaactgtgaatgttttttctaagttttgacagaaagtaagcaccataaactgagctcaagtgtggtttgggaagatgatcttttagatcagttaacattacttttcaaatacattttacaagcctttcccaaaatagaaagctatacttaattgtactttttggaaacagttaaactacttgcttcccatccccaataaattagtgtatgtgtaattttggaggggtgtgaagagcaggaaaaagacaaactattttattaacagttgcaaactgaaggcccatagttgtgttttgtgtggcccttactgtggcttaaaataattaaaatttatttgctaccatctaaaactttggctatctcaccactgtcctcaactaacccactcatttaaataacctgtttaattcatgtagctgcttgagtttgcaacccattggttcagatgctgcatagattcacaaaaatttatcatttcataattgaaggtcaagtttgtaccaaatgtaaagctcccttactatgatagtttttagacaaataaatatatatctgcatcaaaatctaacctaactgacataagtagaaataagatcctcaatatcaaaggcattgataattaagactgaggcggtttagaattgggtaaaaatacccaatagacagatggcattcaagcagaagttatatgattttggattctgatttttaccattatatcataatgtacttgagattgaacagaaagtttcttaagttctccatgccttggttttattggaaacagtataagtagcagagcacttatagcagcaatagacaatatgaaataatcaaaaggattatactgcatatgtcaacgagaaattaaggtcacaattattaacattagactttttcaactttcagtcaaactctttgcacaaaagtagcctttttaaagtttatcagtagcttctgaaaaaataaatggtgtgataaatatgagctagaactataaatgcatctcttcattttactgctgcttcacatgaaagatggtggattttatcccaactcataccaatacatattatgatttcagtaataaatgccttcctgaaagcaatcaatagaagaatataatttttttcttgtatgtaagcttgaagacaaaagttcaagcctccaaatgagactaaggacaaataatcagctaaactacataattataaaaatattaagaaaactctgcttcagaaaaataaacacatttgtctagcaaacacttgagtagaacagttttatctttagccaaggtgcagggcctaaagcctaaacatttacagcaaaccaaatctggaagacagagactgtgcattagagacatttgctgctccgtatcatcatagtgtaaacacttctatcagggtatcacaatataaattccaatggttagaattataaactcagcataagatcttgtatgtgatataatttagctagattaaaaagaatatagctggttttatttcatctggcatattttcaagatttctgacacagttaaccaaatagtgtgtgtgtgtgtgtgtgtgtgtatatacactttttttaaatggggaaaatgagttagtttctgccaagagttaagaagccaggctcccttttaaataagaataataatgataaaagcacattagaaatggtttttagttgttacttactttccctgttacgttacaacttgaccacaataatctatcaagacatagtaacagcaatatatttcacatatgctttaagactgttttggataaggtgctttttttggtagagaaatctatattaaacttagtatcgctaattgtcagtgttgactaaaataacctggatatttcaaatttaagaaatagaacaaaatatatccctctgaaatcaggtatctcctcttctcaacatattcagcctcaactggttataaaaatataaccagtttttcctattaaaaagttaatactctaagacatgcaagaaatcttagcatgcttattctgtaaagggctaagttaaagttttcatttttattttttagagacaaggtcttgctctgtcacccagaatggagtgcagtggcatggtcataggtcactgcaacctccaactcctgggttcaagcaatcattctgcttcagcctcctcagtagctaggacttacagatacgtgccccaacaccaggctaattaaaaaaaaaaattattttagagacgcagtctcactacattgcccaggctggtcttgaactcctggcctcaaacaatcctcctgtcttggcctcccaaagctgtgggattaaggtgttatccaccatgcctggcctaaaaaattctttttaagagtaatgacctttgtgtcaatttaggtaggttatccatgttaaaatattactcaaacaaacctgcaaatgtttaaattatcatctctagaacatgccaccattcgtgttatagtttattttgaggaagaaggtataatggaaaaaaagaaaaagcacacggcttggaatcaaggccttgagacttaggttgtttgaccttggacaagtcacagtagccctttataatttcctttctcaatttcttcgtctgtaagaaggggcttagaattagaagtctcttagctttattgaagttggagactgtgtgccaaccttaccttagagaattggttgaagaaataaatgacaatatgcatgaaacagtaaagcatcagatactagaggtaagtggacgagaaagtcattacttaccccatatttctgaaacccagtgtaggtttcagtggactttaaatgctgtcgtaatatattgctgcatggtatgtgaaataagccataaggctgtggaggccatatagtcattaccttagtcagttcaccccaaatcattttaccacctggaccgattccttctgaaagagctctgactacattattcaatgtttggcacataactttaggtgacttaaaaagtaagtttcttgggttcttggagtggctactttttcatcaagtgtcaatgaaaatatatacattggcagaatacatacagaacagtgttcaaacagttttgaaacaaatattttaaaaaataacttctacaattgatcttaaattttctaagaaattttagctaacattagcactctttaatatcctccataatactttttggtcacttttcaacttatgaagtgtttttgaaagcataactatataaaatatgctagtggtgtaatctatgagaatgagtgcatgattggtaccatattagtctaaatattattttattcaaatatcttacaatctagagtttttcttgttaaagtcacatatgagagcccgataactgtgaataaacttttgctagcaataacaactaacaaaataaaatattatcttatgtaagaaagcagtaaatagaatcagaggttcttaaaggaatgagtcaatattaagaggatttaataaggggactcagtaatggtgcattcagcaggtgacagagacctacttctaccttatataacactggaaaaaggcaagattgctcatggaagaggcttttggatgccagaagatgtaatatgacgcataatggcactcagggaattatataaaggttcctggcaatagtagcataaaaagtaaaagttaatcccagtgagaggaggctcagactcagctttcatatgattaaaccctaacatctaaaaacaaacctaagcaagagcgagcatgtacataagaaaaaagattaaatgagtactggaaaatgctgaaaatacacttaaaactttattaccaccacagtccaaaagatgaagtataacacttttgctatctagatttttattattacatccaaattatatttcagggccaggtgtggtggctcacgtttataatcccagcactttgggaggatgaggcaggaggatcacttgaggccaggagtttaggaccagccagggcaacatagcaagaccctgtctctacaaaataaaaattagctgggcatggtggtaggagtctgtagtcccagctacttaggaggctaaggcaggaggatcatttgagcccaggagtttgaggctgcagtgagccatgatctcaccactgcatttcattgtgggcaacagagactctgtctgtctgtctgtctgtctctctctctctctctctctatatatatatatataatctttcaaacatgagcaaaggtttgattttttttttttttgagacacagtcttgctgtgttgtccaggctagagtacagtggcatgatcttggccactgcaacctctgctccctcagttcaagcaattcttgtgcctcagcctccacagtagctgggattacaggtgtgtgctatgacgcccggctaatttttgtatttttagtagacacggggtttcgccatgttggtcaggctggtctcaaactcctgacctcaagtgatccacccgcctcagcctctgaaagtgctgggattacaggcgtgagccaccgcgcctggccacaaaggtttgatttttaaaatatatgatcactttctacctttgaaatattattgccaagaatatttgattcagagcttttcaaatgtgaatgtgagttttggaataagacatatggaatcatagcactttgataactcatgctttatcttagaaagtaatgcagacttctgatttcaataagtcaaaaaaaaaaaaaaaaccccagacatttctttttccctcacctgtcagagaaactgcctttaaattaaaagacaaataggaaacagaaacacagtctccaacttcagtaaagctaagagacatctgattccaagccccaatatatgaacataaaaggtagatggacaaatgttaaatgactaagcagaaaagagaaagttcaaaccaacgtatccacagagctactgctgggacataagccagtttgacctgcaggagttcagaaagtctcaggaaatggaggtataaggaaactgttgggaggatgtgtaccgcaaagatgaaacagtaagcaagaaacaagaggaagatctgagacccaggaaactggcaatccatcacagaagacagacaaatcaaattcctaggatgatagcagttattggatgatagcaggatattggcagttatctgggcttgatgagcaatttagccctgaccgaagtagaagatcaggaggctccagaaatgatatctccaggagaaaaaaggaactggcctgttatctgacaggtctgatagaaaaactgtattgagaggcatggcacacaactattggaaggtgacacatttatttagataaagatcttttaaaaagagaaaaaggaagtggaagagaggagggttctatcaaccctaaagttcaaaacagaaaggaggacgggcggctgtaaccccagcactttgggaggctgaggcgggcggatcttctgaggtcgggagttcgagaccagcctgaccaacatagagacaccccatctctactaaaaatacaaattagctgggcgtggtggcgcatgcctgtaatcccagctactcgggaggctgaggcaggaggatcgcttgagcctgggaggtggaggttgtggtgagccaagatcacgccattgcactccagcctgggaaacaaaagcaaactccgtctcaaaaacaaaacaaaacaaaacaaacaaacaaacaaaaaagaaaggaaatcatttgattacagtgaacagtattttcatagtcatgataatgtacataataactatagatttaattaaaaattgtaatgtaactatcttgggaggctataagaaggaaaaagcagagtaagtgaggtaaaatcctgtctcaaataggaatttaatagttcatgtctaaaactgattaaataaagataaaatatggaggtaaataccagataaaatagctaaagaagtgaaagtcactgcctgtcagaagcaggggctagaagtggggtgcaggccaaaagactgttataagaaaaagctatctactgtatttagtgtatattagactcttggtaagtgctttattggacgtttttcaacttgataaatcataatttaaaaacaaatgcagattattaattttaatttattgtatacatttgtatgcctcactatgtaaaacagtggtgctcaaccgagagcaattttgccaaccagaagataatggcaatgtctagagatattttgggttatcacaactggtggcagggtgaccgtggggggtgtctagatcccactaccggcatctagtgggtaaatgctagagatgctgttaaacatcctggaatgcacaggacactcctcggaacaaagaattacccagtccaaaatgtcaatagtgccaagtttgagaaacacagcttgaaagtaatttcaagtcacaaatctggtatacttgatgcagtaggaaaatacactgagttatttgtatagcttactatagtcactgacgcactggggtgatgtgtcctacagttacaaagtataaactgaactcattcccaagctttcaagcctttaatcctagggaaaaacaggaaagagtgatgttgtaaacatggaacagcaatatctactacagtttatgttatttgagaccttaaagctttacagttagaaaaaaaagtgacatagtcacctgaagcccctctacatgtctacaatctgtaggcattgagagaatttgactgaataaactgattaaaattcacaactaaaattctcctcaaaagaaaaaaattagttattttcagagaagctaaaaaacaatcccaccactgcccttaaggtagagctgctgattatgctccatgccaacataagtaggtaagtgtcaatcaaccttacaagtcctcagggtgataatttcacttttaaatcctccaacctagtttgagagcaaaattaatatataaaggtcaaagttccttttctcaccaaaaataagatgaacacaagaaaataacttcagaattgttcaaaaatcaaaaccaaaagtttttatttattaattatccagagaaacttccagcaatattttcaggcatggctttatgtatttatttatttattttttgctaaggaaatacaatgacatgagtattaggagaaaaaggttatcaaccgaacttgcttaaaattttgggattttaaatatttccatccttgatcccaaaatatcttttaaaaatatggagaatttaaaaattaacctcagcaattcatccatttgttttgtgtttttttgtttgttcatttgtttttcagaagggatggaaacagaggggtttcattaactcattttttgctggccaaggtaaatatacaatttattaacctagacagcttacttagatttaaactaggttttaattttggaatttcaagatatacttagaaactgctttcaaaatacttttggccaaactatcttaaaaaaaaaaaaaagctggggaaaaaaatactctgaggaggaaaaaaaaggtttaagtaattgaggatatactcactctagacttttagaggtgacaaggttttttcttctatatctgtgatggaacctaagtatttccaaaaattccaagagcaagttgctgaacttgtaaatgttaaagagttaagtattacagcactttaagtttatattcacatccatttcccctgggtaaccatgtattattatcagagctatatccaggtgggtctctgtatcagatgcaacactataaccagaagtccactccactctgacctcaggctgtattcctggatctggtttcccataacttagaatgtcccaaatcctgaaaatggcatacagagtcctaagtgatttggctcctaaatacctctcccagcttctattcacatgccattctctcagactcacaacttcagcttctttcagttcttggaaactgctatcctctttcaaccttagaaccttaacacatgctgttctctctgttgagaatactcttatccattctgtacacattcataactcctagttttctttccagtgtcaggttaaatatcacttcctcaggaagcctttcttgatccccaaagacctgctataacattcccagggttcctgtgactttttcttatagcctttatcacaactgtgattgtttcttcattacattaatgtcaatattccttgctagactataagcaacatgagacaaggggctataaactgtgttgtgtatcactctgtcccctgagtctattataatacttggtgctctagccagatattaaaaaaaaaaaaggttgctttattattctgaatagttgctttttttcttttctttctttctttctttcttttttttttttttttttttttgagacagagtctctgtcacccaggctggagtgcagtggagcaatctcggctcactgcaacctccccctcccaagttcaagcaactctagtgtctagtgtctcagcctcccaaatagctgggattgtgccatcacacccagctaatttgtgtatttttagtagagagagagagtttcattatgttggccaggttgttctccaactcctgacctcaagtgatccacccacctcggcctccaagtgatggaattacaggtgtgagccactgcacccggcctattctgaatagttttataatctgaatagttttgttgtaatctaacctctgatgaggccattccactttatgaaatgtttgtatatttgaatctcactgtagagaagattcaaatctcatctctctggctcctccatcccttttaggcaagttagtcaaagtaaattggtatctgcaagggaggcgaaaggtgttggtcaacttcagctttcctaagcatctgagcacctggtttctattccaccaaagcatcttgttatatgttcctgttcttccataaattattgacattactagtgtagagacagcatcttgttcatttttacacctactgcattttgtacaaattaagctcttaaaaaaagtttgttaaatgaatgaataagtgcatgacaaaacattcaatatcattaacatttttttttttttgagacagtgtcttgctctgtcgcccagactggagtgcagtggcgcaatttcagctcactgcaacctttgccccttaggtacaagtgattctcctgcctcagactcccaagtagctggaattacagacgtgtgccaccacaccggggctaattttttgtgtttttagtagagactgggtttcaccatgttggccaggctggtctcgaactcctgacctcaaatgatctgcccaccttgggctcccaaagtgctgggataacaggcataagccactgcacacggccgtcattaacatagttttgatagaagagtaattcaaaagggatttataaatctattcaaaaggaacagatgaatctacctaaaaggtttctgaagtcaagttcctcttgatatactacagtcctttgcattcctgccctcattcattttctcgtgaatattcatattgccgtcaaagcaaaaggaataacaatggaacaatatcattctccttaaaaagaaatctgttagatttaagaattctaatacagccaggtgcaattggcgcgagtctgtaatcccagctgctcgggagctgaggcaggaggatcatcacttgagcccaggaccagcctgggcaatatagtgagactctgtctcaaaaaaaatttttttttaattccaatactaccatcatctgataatattttgacagttgaaagcactggtttaacatggtttaatgtgctttattactttattaatgctgttatcctttagggaaagcaccctttttctgtggtttataaaatgccaacaatgcatggaagcctatcaatttttttgtgtgtgtttgttataaagtcgataagtaactaatataactaaaatagatgtctgaatttttcaatcataaatgtaattttaaaaaattgattaaaataatatatacccaaatagtttggtacattgagagctaagataagtttcctaaacaaaaaaaggaactcataatggttattgtatgctaatagtaagatagacaattcagatcactatgcgaattttaaatagtttccaaataaaatctagtttggtaactcaacatactatattaccaaaaaaacccacaaatataaaatttattagcatgataaattattttaatcattgtaagggcacttctgacaatgaaaagtaccatcaaattttattaaaccaattataaaaatctaaacacaccacttcaacattttaaaaatataaacatttttagccatatgccatggttttatacatttttcttcagagaagtaaaggaacaatacctacgaaggagaacttttctatatactattatactatactatgctaggcaatacaaataaaatgcaattttaaaacctaaatatatttgtaccttatcatatctcacaaactatgtccatgtcaccaattggagaggtggatgcctcaattataaagctgaatactcctgtggttgttagatcacagtaattggccagaggatttgctttagatatccattaaaaaggcagccttgttatactgtgatttaattacatgaaaaagaaaacaacttttattttagttatacttttccatcgacatctagtcatataaaagccttggttcattctcatgcccctcaaatgctttggtttagtgcacagaaagttttctttttaactattatacgattaagtatatccttatgaatgatcagaagcatctgggaaaggtggaagtgaaaaaaatcctcactgggaaagttagcttaatgcttaccttcagagtagcccattatcaacatttcatagtgggtttctttattttcaggtccctcaggtatgtgcaataaattatgacttgaactaaacaagtcacacttggctccaaaatgaaattttcctacctctactttctagtccctaaggtgggaagaggaaatcctggtcacagccaaaggagtcatatttttggctctaacatacattttccttcttctcaaaaagccaaaccctgctattgagactgcaaagtcttatgttagtattttaaactgtattttaacttttacttccataatctttctcaaatttaagaaaaaattttagtatcataaaattaatgtcactgccttctttttcccactcaaatcacttttctgactcaatgatcttaacctttttaaatatgaagtcaaatgaaatagacaaaataatgcagaaataggttgtttcgtttctataaggtagaacatttaaatttttatttactaaataacttctacttattagactattaatgtaaaagaaaactataaagttctaatttaaggtcctataatttgaagcatagttttagttttggaagagccatctatgtaggtcatttagatcatcatctcttttcatagggaataggagtatggcagacacaccctaaggtgatatacagagagtcacaactttgtaatgctctccccttaagtgagggcagaaccagtgatttgcttctagccaacagaatatggaaagggttctgggatagtcactcttaattaggttatattatatagcaaaaatgatgggaagttattcccatgattttttaattttatttttttcctcacaattttattaagttgtgtaagactctgtattggctgactggggctagagagcttcctattggcctctggaagtatactgtcatgatacgagggggcttgtgaaaaggccacatggcaagaaactgtgaatagcttcttgaagccaagagtacaccttagggctaggcacggtggctcacacttgtaatcccagcactttgggaggctgacgcgggtggattacttgagctcaggagttcgagaccagcctgggcaacatagcaagatcctgcctctacaaaaaaaaaaaaaccacgtttaaaaattagctgggtgtggtggcgtgtggctgtagtgccagctacccaggaggctgaggtgggaggatcacctgagcccgagaggccaaggctgcagtgacccatgaccgcaccactgcactctagcctgggcaatggagtgagaccctgttttcaaaaaaatttaaaaaagactgcctcttggatggattaggaagaacctcagtcctacaaccacaaacggaccccaagtgccagataacaacacaacctggccaacactctgattgcagcagttttgtggaaccctgacccagctaagccatgcccacacttgtgaccaatggaaactgagataataaatgtgtgttaagccactatgtgataatttgttacacagcaataaaaaactaatacaggctgggcatgatggctcacacctataatcccagcactttgggaggctgaggtctgagcatcccttaaggccaggagttcaaggccagcttgtacaacatagcaagacctcgcctctccaaaaaaaaaaaaaagtttagccaggtgtggtggcacatgcctacagtcctagctacccaggagactgaggcaggaggatcaattgagcccatgagctcaaggctgcagtgagctatgattgtgccactgcactccaacctgggcgacagaacaagaccttgtctataaaataaaataaaaatatttaaataaataaataataaaagagggatagctaatatagtcaatataagatactccctccacttattatgttctactatgtattaaataaagtgtaagatgctgttgaggattgagcattcccttctacatatcctctaatgatttactactataactaccctgtattgcctccttatgagtcatatcactgtttactaccatcctgttcattattatctaatgattactatcatttccatccttaaagtctccaggaatggagagtggttgctgttgtttttaaaaacaaataacaaagtcaaatacaattttaacaacttctactaaaaccccattcaatcattaactaaaacatttattaaacactgtgtttttaggtaatatcttagttgtagagacacaaagatgctgaagaaattatccctatcctcaaggtacaccatgaaacagattataaaacatctttataaacactaaatatgtgctttaggaaataataaaggacactggtaaaggtaactgcaggtgaatactacaatatgcttttgaattgcaattcctctgttttccctatattatttaaaaggcaaatgcataaaaacaataattaaaaactaacagccacacaaagtataaagatggaatctgtgacaataacaatataaaaagggaggaacagagattcagatgatagttataatccccaaggtaaatactaaaaaccaaaaaatacatataaaaggaaagaagggaatcaaaatagtatactacaaatcaactaaatacaaaaaaggaaatgatgaaggattgaggaacaaaaagcacatgacacaagaaaacaaatagctacatagcaaaagtaagtcctttcctatcagtaattactttaaatgtaaatggtttaaactctccaattgaaaggcagagattggccaaatggatttttaaaaacctgatccaactatacgctgtaaataaaagattcacttagatataaggaaattggacctcaccatatatcacatagaaaaatttactcaagaggaatcaaatatctaaattaaagagttacaactataaaactcttcaaggaaaacattaggggcaaatatgcatgatgttggatttgccagtattttcctaaatatgacaccaaagcacaggcaacaaacaaacaaaaaaaacagataaactggactgcattagaattttaaacttaacttttatattccatagaggcatacaaatattttcaaatacttgtttaaccatttataaaaatgttaagaaatcacccataatgatgctctgacatatttcaagtattttaggtattgactgctatattctgggcatttccaaataataaaaagccttcttaatcattataaaaactgcatgcgtatactcttaaagcttgtaacacaccagtcttataaatggataactaacaaataccttttaattatgaaaaaatgcgatagttgaggacttctttttgaagtcatgattctaagtcctttgccatgtgcggtagaaattatcccttttctccccttccttgactttgagattgtgcatggacgtgttttgggcaacaggaggttagcagatgtgatgtaaataggtatttgacttaactgcttacagttaagcctgccctcttgtactactgccattgcaataataacatgccttggctagtctgttggtccacaaagaatgaaatacaggtggaacagagctgactcagttgacttcaacacagatcagccaactagggcagagtagctgagcccagctaaaatcgagagagccaaccaaccaagcccaagcctagatcatctgtcacccaatcactccagagatgtatgacctgtaataaatgattgctgttttaagtcactaagttttggagttgttacagaagaagaactgatccagacatatggcaataagaaatacacttcccagtacatctagtagtgctggtaaataatttcactttttctatcccttgtccctgcagcttgaactattcttgtgtccactctacttgtaccttttgggaaccactagggataaccctttagaaccaccttcctcccctctacccagaacccattgatgcttctgttattttgctgttttatgcacataagcagaactatgacaaataggatcatgactgaggaatgtcagagtaggccatcaggtgtcttttttgcatgacagactgagatattgtctaggaagaatttatcctgaggaaaaaaagcattaagaaccccagattggtataataacaatgttcaaaatcatagctgttgaggcaaaggtggagaaaagagaaatggaattttctcacaaatgtatatttttaattttaagaatttttggaaaataatgaagaataacataataaatacctgcattctcatattttcttgcagcttattttcctttactaaaaattatggaaaaagttaaaattcttttgataactactctgaatatcattcccttctcttctcctcatatgtaatcagaattataatcttgatgatcctttcaggccttgttactttgtacgtataatatttagtacaacctagtattagccataaagtttttcttcttttccaggtctcaagaactcatatgtagggtccaaggaagagagaggacataggcaaaaatggaaataattagttttagggaacaaaattgtattttattaagatattggaagaagatgtggtctaaagaagggaaaaggattctttccactttaacaaagcagccttagtgcaataatgtagagctagagtaaaatgataagacattaaaaggagacaataccagtaccaacagcagtgccatcagtagcactctacttcagtggaatgcagcaccaatgctgttgatggtgacagtagatttcttgggtagatgtcaactgtttcatcagtagctgtagtcaaggcagcatcagccattttagaataggagacccagctttgggcatagccattagtgccctcagcagtagcactggttaactggagaaaggtagtagaaaccaccaaagttactggaggctgaaaaagtattagactctgaatcatcaagtgagataccccctgaggactttcagaaattttgaagaggtccagaggttacggaagagtaagggctaccaaaagaaatactgcttattactgttaatgttacctaaagactgctacggactagaaaaataaaagaaaaattatctaattcacagtacctagtaaagtattaacaattaaaaagataactattctaatgaaagaactcctgctttggtatgagaccctaactgactgtatcctagggggagggatataggtcataatcaataagtcagctcagtggtcagaaaatctcaaattttctcagattgccagcactttcaaatgcctgtaggaagtaaaagaaaatcctccttgatgaacaataagttcaacttaggctcaaattattactatagtttttcaaatatattgtttaggaaacagtcagtgataatgagatacaactgtttctggccaagattgagtaactggtttaagaatatttcttccattgtaagtaatcgcataaccgggcaaaatggagcaattgttttcaggtagtagacaccaaacagcacaagacagtaattctggagctaagtggaattcattaggtgaactccattatcccagttctctgcttgggtataatttcctgaccacagcacagagcattaaagtacaagcagagcgcagtggtcctgttgagctgaggtggaagagatcagaatatggagtgactaaatcacaagatctgcaaggcaggacactggaaagaagcgagccagatggacaaaagaccccaggattccccggaggaacccatgagtctgtggttaaaagactgataaaacacaaattgctgggcttcacttccacagtttctgatttggcaggtctggatgagcctgaaagtctttatttctattaagttcccaggtgatacgaatgcacctggcccaggaccagactttgaaaataactcctgttgaccaaagacagtataagttgaaaataaaataaaatctgtatctactaaatttttctcactcattcagattcaccaaagatttaaaaatgtctaaggatacaggaaaacatatacaggcatccctgagagacattgcaagtttggttccagaccaccccaataaggagaatatcataacaaagtaagtcacatgaattttttggtttcccaacacatataaaagctatgtttacactatactgcagtctattaagtgggcaacagcattatgtctcaaaagccaatgtatataccttaacttgaaaatattttattgctaaaaaaggtgaatgatcatctgagccttcagtgagtcactctctttgctggtagagggtcttgcctcaatgatgactgctgactgatcagggtggtggttgctaacgttggagtggctgtggcaatttcttaaaataagacgaccatgaagtttgctctatcatgtgactcttcctttcacaatagatttctctgtggcataagatgctctttgatagcattttacccaacataaaacttctttcaaaattggggtcaagcctctcaaactctgccgctgcttcatgcactaagtttatttaatattctaactcctttgttgtcatttcaacaatgttcacagcatctttactaagaatagttcctatctcaagaaaccactttctttgctcatccataaaatgcaactcctcatctgttcaagtgtcctcatgagattgcagcaatttagtcacgtcttaagctccacttctaatttagttctcttattatttccaccacagctacagttacttcctccactgaactcttaactccctcagagtcatccaatgagggatggaatcaatgacttccaaactcctgtaagtgttgatattctgacctcctcccatgaatcatgaatgttcttaatggcatctagaacggtgaatcctttccagaaggtttttaatcgactgtgtccagatgcatcagaggactcgctatctatagcagttatagcctcgtgaaatgtacttcttaagtaatgagacttggaagtagaaattactcctttattcattggctgcagaatggatgttttgttagcaagcatgaaaacaacattaatctccttgtacatctccatagagttcttgagtgaccacatgtgtggttaatgagcagtaatattttgaaaggaactgatttttctgaggagtagatctcaataatggacttaaaatattcagtaaaccatgctgtaaacagatgtgctgtcgtgcaggctttgttgttccatctatacagcacaggcagagtagatttagtataattcttaaaggctctaggatttttaaaatgttaaatgagcattggcttcaacttaaagtcaccagctgcactggcccatcacaagagagtcagcctgttctctgaagctttgaggtcaggcattgacttctcctctctagctatgaatgtcctaggtggcatcttctttcaatagaaggctgattcttctacactgaaaatctgttgttttgcgtagccaccttcatcaattatcttggccagatcttctggataacttgctgtagcttctccatcagcacctgctgcattaacttgcacttttaagttatggagatagcttctttccttaaacctcatgaaacaacctctgctagcttcaaacttttctgcagcctcctcacctctctcagctttcacagaattgaagagagttagggccttgctctgaattaagttttggcttaagagaatgttacggacagtttgatcttctttccagacactaaacctttctctatatcagtaataagactgtttgcttattatttgtacattcactggagtaacacttttaattcctttgaagaacttttcctttgcattcacaatatggctaattggttggtgcaagaggcctagcttttgtcttgtctcagctttcaatatgccttgctcactaagcttaatcatgtctcgcctttgatttaaagtaggaagcatgcaacacttcctttcacttgaacactctggggccattgtagggttattaactggcctaatttcagtattgttgtgtctcagggaatggagagtcccaaggagagagaaatgggggaagggtagtcagtggagcagttagaatacatacatcacttatgaattacgtttgctctcttatgtgggtacagtatgagatgccccaaaacaattacaatagtaacatcaaagatcacttatcacagattaccctaacagtataataataatgaaaaggtttgaaatatcgtgagaattaacccaaatgtgaaacagaaacaagtgaccacatgctgttggaaaaatggtgctgaaagacttgcacaatgcagggttaccataaaccttcaatttgtaaaaaagcactataaaagcaaagcgcaataaaatgagggatccctgcaattaactttatacaaaaccaatgactcctgtaataataaaacttaaggttttgatggcctacctgtagatctttcacatttggaaaaggaattcctattgttatgacagcacgggcattgtcatctgagaaatccagaccctcactcactttaccacgacaaactgctaccaggagagctccatcttaaacaacagaaaaaagcatatccaaaattctcagaaattgcttattcttgtcattttgaaaatacctgatttataattatagtaattacagtagcaaatttaaaataatcaaaataaaacactattatgagataaagttttaaaagttcaatgtctttaagtaaataaggggaacaaaattacatttatatgcaaaagggtagcaaaccaatttacaaactctgcatcttccagataacttatacagtaaaaacatgtcagaatagcaacttgcatatgaactgtgtgattataaacaggtttatttaataaaaattgaagttgcattattacctttaccacctgaaagtaaaattctcagaataattgaaataattgtaattgataatacatatcatatggaatcaatatatttaaaagtattgaaaacagacacagagaacaccataatatatacaccataaaaagatactgatatgttatattacctctttcttgcattgttcataaactactactatcccttcacatcaaacttttttattttattttattattttttgtgtgtgagacagggtctcactctgtcagccaggctggagtgcagtggcacaatcacagctcactgcagccttgacctcctgggctcaggtaatcctcccacctcggcctcctaagtagttggaactataggcacatgcaccacaccctgctaatgtttgtactttttgtagagacaggatttcaccatgttgcccaggctggtctcgaactcctgggctcaagtgatccacccgcctcagcctcccaaagcgctaggattacaggcaagagccaccacgcccggcctcacatcaaactcttcatggatatgctctaacttggaattgagttttcagttatgttttgaaaattcaagtttaccttatgtaatagaatacaagcaccaagtgtactaaatgcatcagaatataggtctcatttggctagtaaggaatatatttatatatatcctaactgcctttttgcacaaactatttcaggtagtgcactgaagactgtgagatgatggcatcgtttttcttaaagttgaatcagcatactcaagtgaaaatattcataggagaacaagtacaattaaaagaatttctttacccaatttattttcttttcactcaggattataatttttctcttaagtgtaattcatctaaaaatataaaattataattgtaccttcttactttgtaataaaaaatattttttcaccgaccatgaaataatttccagttacctttctctcctttgtatttgattgcgtcatagtacacctgcagtaattcatcaaaatttgttttttctcctccctgtggttctacaatgactgtcttcaccaactccagattatgccataaaccagtagagagccaacgttcttttaatttttctaataactaaagaggggaaagaaaaaaatgattttttgtgtgtctagctaaacaaacttaacttcatttgtttaagccaatgtgactacggcaagtatattaatctctctgtgtcttttctcatttataaaatgaggaaaacaatatatctcatagagctgttatggggttaaatttattaacagatttagagagatctgaatggtgctggcacagttagctgctgctgctgctactactactattatcttggcaatttctaccactactactgctactactactattactactactacttctactattatcttggcaatttctaccaccaccaccactactactactactactactatcttggcaatttcaaaagcaaaagcaaaaaacaaaaaacctctgtcaaagttaacaaactttaagttctctctttaaacctaaggtgaagtttcttaatattcttaaatagtcttcaaatgaagatgatttaagatcattttactaagtgtataggcagataagctcattatttgaatatttgatcatcattaataacctgcattgaaaaaagatagaaataaagactcagccaagaagtagaaaatatatgggcacaaatggaacatttacagccatgggctagattacaaaaggacattcaacaaattttaagcaatccttatcatattgatcacatatttcaacagttatgccatggtagattaaaagtcaataatataaagtcatggtagattaaaagtcaagcccaaaacaaaaactcatcttgattgattgattgattttagagacagggtctctgtcacccaggctggagtacagtggcaagatcatagctcagtgcagcctcgaactactaggctcaggcaatccctccaccttagcctcctgagtagctgggactacaggtgcatgccactacacccagctaatttttatattttgtgtagagatgagatcctgctttgttgcccaggctagtctcaaacttctggtctcaagggatcctccagactcagccttccacagtgctgaaattacaggtgtgaaccaacacacgtggctgtaaaactcatattcttaaaaaccatatgagttaaatagaaaaaacacagtataactcatgaaatctttagttatgaataagaaaagcactcacaattcgaaacatgtggcatacagcaatggcaatacatggaaatacatttatagctttaaatatatttatttttaaaatgtcaaaataaaagaatcaagtattctttccaagaagctagaaaatgaaatatagcaaatgcaaagaaagaagttaataataaagctgaataaatgaaaaagacaaaagctaatattagagattattatttaaattgaactgttttatccacttgttatatactatgagttctacacaatttggacaagttattataagaaaccacccaaaattctctggaaaacagcaactgatcaatttttataagatagtttatttcctcaattttacctttaactatttttagaaataaacttcttaataagactataaaacaaaacattagtaaaatagttaactgctgtacaatatgctttaattaaataggaagaactactttaattccataaacacagctaagaagttattatattactttttattctccagaaagacatcaagggaggaatagaggaacaaaaaagctgtagttagacagaaaacaattattgaaatgataataatgtctttccctatcggtcattactttaaatgtaaatggattaaattttctaatcaaaagatataaagtagctggatagataaaaacgctgtctgcaagtgactcactttaaatttaaggatacccataggctgaaagtgaagggatagaaaaagatattacttataaatggtaaccaaaagacagcagaggtggcaattctaagatactaaatagattctaagtcaaaaattgtcacaagagacaaaaaaaaaggacattatataatgataaatgggtcaattcactgggaatatttaacaactataaatatacacacaaccaacatcagagcacccaaatatagcaagcaaatagtgattgtactgaagagagaaataaacagcaatataagaggagtaggaaagtcatatatctaaccttcagtaatgaataaaacatccaaacagaagatcaacaaggaaacggaacttgaacaatactagagaccagatggacctgacatatatagaacattttacccaacagcagcaaaatacatattcttcacaactgtacatggaacattctctaggacagatcatgtgttaggtaacaaagcaagtcttaacaaatgtaagataaaaattaataccaggtatcttttgcaaccacaacagaatcaaactaaaattcagtatcagaaagaaaaccagcaaatttacaaaaatatgaaaattaacacacttttgaacaaccaatgaatgggtcaaaaaagaaatcaaaaggaaagttatgaaattatcttgagaccagtggaaaaaaaaccacaacataccacaagtaagaaatacaccaaaagcagtactaagaggaaagtttatagcggtaatgccaacattaaaaaagaaagatctcaagtaacccaattctacacttcagggaactagaaaaagaacaaagtaaatacaaagtttgcagaaggaaagaaatattaagattagagcagaaataaaatagggaacagaaaaacaatttaaaaagttggtttttgaaaagatcaacagaattgacaagtctttacctagattggttaaggaaaaaaaaaagagaaaatcagaaatgaaagaagacacactgatgccaccgatacaataaaagactactctgaaaaattatatgccaataaattggataaaatagatgaaatggacaaattcctagtaatatacaacctactaagactgaataatgaagaaacagaaaatctgaacagactagtaaggagactgaatcagtaacaaaaagtctcccatcaaagaaaagctaaggacctaaatggcctcaataccgattctacaaaacatttttatttatttaattttattaattttttattttcatttctttgctaattaattaatttatttttgagatacactcttgctctgtcacccaggctggagtgtagtaatgtgatcatagttcactgtaacctcaaactcctgggctcaagcaatcttcctacttcagcctcccaagtagctaggactagaggcatgagccaccatgccctggtaattttttttttttttttgtaggtatggagtctcactatattgcccaggttggtcttgaactcctggcctcaagtgctcctcctgccttggcctcccaaagtgctgggattacaggtgtgagccactatgcacagtcctctatgaaacatttaaagcaggggtccccaacccccaggccacagaatactggtagaatccaggctgcacagcaggaggtgagtggcaggtgagtgagcattactgcctgagctcagtctcctgtcagatcagcagcagcattatattctcataggggtacaaacactattgtgaactgtgcttgcaagggatctaggttatatgctccttatgagaatctaatgcctgatgatctgaggtggaacagtttcatcccgaaaccatcacccccacccccaacccaggtctgtggaaaagctgtcttccacaaaaccagtccctggtgctaagaaggttggggaccattgattttaaagactaatacaaatgtagattcaatgtaactcctatcaaaatcccaatgacattttttacagaaacagaaaaaaatacaaaaattaatatgcaaccacaaaggacttggaataatcaaaacaatcttgagaaagaacaacaaagctagaggcatcgtgcttcatgacacttacatcttacaaacccaccataatcaaaatagtaattgcattgccataaagacagacatatagaccattggaagagaatagagagcctggaaataaatccacacatgtatgatcaactgatcttcagcaagggtgccaaaaatacataatggggaaaggacagtctcttcaacaaatagttcagggcaaacaatatccacatgcaaaagaataaaactggacctttatcttacacaatacacaaaagttcactcaaaatggattagacttaaatgtaagatttcaaactgttggctgggcgcagtggctcatgcctgtaatcccagcactttgggaggccaaggcgggcagatcacgaggtcaggagattgagaccatcctggctaacacggtgaaaccccatctctactaaaaatacaaaaaattagccgggcatggtggcgcacgcctgtagtcccagctactcgggaggctgaggcaagagaatcgcttgaacctgggaggcggaggttgcagtgagccaagatcacgccactacactccagcctggcgacagagcgagactctgtctaaaaaaaaaaaagacttgaaactgcaaaactcttagaaaaaaacacaggagaaaatttttgtaacattggatttaacaatgattttatgcatatgacataaaagcacaggcaataaaagtaaaacctacgattgggaccacaacaaactaaaaggtttctgcaaagtaaagggaaaaaaaagagtggaaaggcaacctaaaggatgagaaaaaatatctgcaaaccatatatctgataaggggttaatatccaaaatatattaagaaacccaatattaaaaaaaaattgaaaaacaggcaaaggacatgaatagacagttctccaaagaagacatacaaatggttaacaggtatatggaaagatgctcaacatcagtaattatcagggaaatgcaaatcaaaaccacgatgagatattggttcacagctgttcggaaggccattatttaaaaaagtaaataaaataactattagtgaagatgttgtgatattggaatccttgtgtattgctggtgggaatataaaacagtatagccactgtggaaaacagaaaaggaaataaaaatcaaaataaaacagtatatatagaaatgttttatgggtttcaatatacaagtcttttacctccttaagtttattcctaagtgttctatttgttttgatactactgcaaatggaaatgttttcctaatttgcttttcagacagtttgttgtcagtgtatagaaatacaactcatttttgtatgttaattttgcatattgcaactttactcaatttattagtcctaacaggttttttaaaaataagatctttaggaaagatcacgtctgtaaataaggacaattttactttttcctttcccatttggaagacttttattcctttttcttgcctaactgctctggctaggaattctagtactacgttatacagaaatggcaagagtgggcatccttgccctgtttctgatcttagaggaaaacctttcagtttgcaccactgagtatgctacgagcttcttacatatgacctttattatattaaatttccttctattcctaccttgttgagaatttgtatcatgaaagtgtgctgcattttgtcaaatgcttttttgcattattgaaacaatgcatgaagattcttttcagcagatggtgttgagaaaactggatcaccacatgtaaaaagaatgaagtaacaccttgcctacataataaaaattaactcaacattggtcaaagacattactgtaagagctaaaaaatataaaactctaaaagaaaaaaatagaaggctttatgaccttggatttggcaatgatttgttggctgtggcatcaaaagcataagtaactaaagaaaaatacagataaactcggatttcataaaaaattataaaacttttttggatactgtcaagaaagttaaaatgatagtacacagaatgcaaagcatatggctgataaaagattaatatccagaagatataaagaactacaactcaacaacgaaaaaaccaaacagattcaaatataggcaaaggactttaatagacatttcttgaatgattaaaaaaaaaaaaaaggcccaaaggacatgaaaagatgctcaacatccttagtcattaggaaactgcaagtcaaaaccacaatgaagtcccacttcacttagtataactgctgtccaaataagtaagtgttgcaaggacacgcagaaactgtaactgtcacacattgctagtggcaatgtaaaatggtacaactgctgaggaaaacagtctggcagttcctcaaaagttcataggcatagaattaccatatgatccagcaattccactcctaagtatataaccccaaatatctgaaagtactaggatccaaacaaacagctgtatgctgatgtttatagaagcattattcccaataaccaaatagtggaaacaactcaagtgtcaatcaacagatgaataaacaaaatgtatgacctacgtgcaatggaaaattattcaactataaaggaatgaaattctgacaaatgcttgaatatggataaacccatagtaagtgaaaaaagccactgtatttttgtacacaaagtacaaatattatatgatttcacttatatgaggtacctagaatagacaaattcttagagatgggaagtagaacagaggttaccagggcctgagggaaggggctaaacaggagtcattgttccatcagtacagtttctgactgggatgattgaaaagttttggaaagggatactggtgatggttgtacaacatcatgaatgtacttgatggcactaagttgtacacttaaaaatgcttaaaaggtaaattttatgtcatgtgtattttaccacaattttaaaaattgaaaagaacacacaaatgaatactatttagtaacataaataaatgaactagtttctcacatattaaccaggatgaatcataaacttctagatgttgagtaaaaaatgcaaatacagatagataacaaatatgatttcatttatataaagttcaaaaacaatatgttctttgagaaaaatatatataactttaaaaaactcatgaaactaatacctttagctttagggggatacaattgggaaggaacaaatggaggatttttttttttgagacagagtctcgctctgtcacccaggctggagtacagtggtgcgatctcggctcactgaaatctccgcctcctgagttcaagcaattctcctgtcccagcctcctgagtagctgggactacaggcggacaccaccacacctgactaatttttgtatttttagtagagacggggtttcaccatattggtcaggctggtctcgaactcctgacctcaggtgatccacccctcagcctcccaaagtgccgggatcacaggcatgacccactgcgcctggccagatggaagcttctaatgtagaaataatgttctatttcttaagctgggtgatggatactcagatctccattttattattatttaaaatgtacatattagttttgtagacttatatacacacatatttcacaaatataaaatataaaaattaaacaacattagtctgattattaatatgatgagttagaggaggggttataacaggtacatttaggctactaatatagtaatccagagatggtggtagcttgaattagaaagagttaagaaaaaaaatgcaaaccttgagaataagataaaaaagaaacagtacaaactttccatttcaaatggaggcaaaggcccactagaagattatctagggaaatacactttgttgaactcactgttcactattaattaaggttccagacttagcaaaattatatttcaacttagatatttttgtctaatacaaatacaaatcatttctgttcaggagaaaagataaccctaaaagttactatttattgccctgtagtacatcaaccagttttcttatagtctattcctttattaaattgcctacaagtacgtgaatccttaaatgctctctgaataggccaatcatcatactttttcttcattaatcagtgagtttaataaaatctgtgataggtgttaactttatatgtgagctatgactttatctttttgaaaattaactgtagagaaagaaaagtgaacagattataaaaatacttaaaattaaaatgagtaagatatggtgttggatgggacatgacagggaagggagaaaaaggttcacaggtgctctgtaggtatatgattagcccaaatatgattacagtacctgctatgttttgaacatttgtcctctccaaaatgttgaaatttaatctctaatgtggcagcattgagaggtgggggattttaagaggtgacagggtaacaagagtgctgccctcatgaatggatttgtccagtcatgtattaatggcttatcatgggagtgggactagtggctttatacaaaaaggaatagagactcgagcttgtatactcagcctccttgccctgtgatactctgagccaccctgggactcagcagagagttcccaccagcaagaaggcccgcaccagatgcagcctctcagtcttgaacttctcagcctctgtaactgcaagaaataaattccttttaaaaaataaatcacccagtttcaggtagtctgttacaagcaacagaaaatgaactaagacagtaccattcattcatacaggcaacactggcaaaggaccaagactggaaggaaagattaaaagtttgttgcctttaagatatccaaatggaaatgttgatatggcagttgggtatatgggcatagtacttaaggaagaagtcagaatttaattatatattaggaaagcatgacaaaagataaaactaaaaaagaatgtatagagatgagattgcctagtgggagagtacagatttaaaaggggggaccagcaagaaaatcttatttcctctccatttttttttttttttagagatgggatctcactctgttgctcaggctgaagtgcagtggtgtgatcacagctcattgtagcctcacattcctgggctcaagcgatcctcccacctcaacctctcaagtagctgggactacaggtatgcactgccatgtctggcttgaaaagaacaacaacaacaacaacaacaaaaaaccagagagggtcttgctgtgttgccaaggctggtctcaaactcctggactcaagcactcctccaccttggcttcccaaagggattatatgcatgagccaccacacccagcccctcatctctactactgctcatccaattcatcagcaaatcctgccagcactacttttaaatttatctagactctaaacatttctcactatctttactgctaccacagtggtccaagccaccaccatctatcatctagattacagcagactccttaacagtcacccttgcttcagcctatgctctctacagtccattttccatacagcagccaacataatccttttaaaactaagtttaaaccctccaatggcttcctactgcatttagaacaaaatctaaattcttactgtggtgtgattttacccagctatttctttggccgtatctccttcaattccccatacttcagtcctactctgctacaatggcttccttttgctcaaactaggtactctcctgtctcaagattcccactatctgaacattcttccccctaaatcagaatggtttgcttcctctcttcctttacacttttactcactgtcaccttctcagataggccttcccaaaccatccaattaaattctaaatgagcaccctccagcccccacccaaaaaaattccaaccccaggatcctcttttccccctttccttgctttagttttctacatagcacttatcaccatctgtattagtcccctcaggctaccacacaaaaatatcagactgaatggcttaaacaaaagaaatttatttcttacagttattagtttaagccacagattgagtggcttaaacaagagaaatttatttcttacttcttggctatgaagtccaagataaaggtgcctgttaacttgatttctggttagggctctcttcttggcttgcagacagccaccttctgtgtcctcacatggcctttcctctctattcagagaggaacagggagagagagcaatgaagttttctggtgtctcttcttataagaacactaatcctatcagataaggaaggcccttacagcctcatttaaccgcaattacttccttagaggccccatctccaaatataaccacactgggggttagggcttcaacataaaaaatttggtggtatacaaacattcagtccataatatcatctaacatattagtagctttctgtgtctctcatttattttctgtctctcaccctggaatacaaaaggacaatgatttttgtctgttttacttactgctgattgcccagtgcatagaacagtaccttacatatagaaagtggtcagtaaatactttttgaatgaattttataaatgaatgaaaaatgaaggtccaaaacaatggaaggtcagggaggagagtagggaggggtaaaacataactgtaaaaccagatgcccaagtccttaataaaagaagagttggctgggtgcagtggcccacacctgtaatcccagcactttgagatgctgaggctggaggatcacttgagcccaggagttcaagaccagcctgggcaacttggcaaaaccctgtatctacaaaagtacaaaaattagctgggtgtggtggtgtgtgcctgtgatcccagttactcaggaggctgaggtgggaggactgcttgagccctggaggttgaggctgcactgagctgtgatcatgccaccgtactccagcctgggtgatagagtgagaccctatctgaaaaaacaaataaaaataaaatattaaaaataagagtatccagatgctttgtaagatgacaaagatgagggggaaagaagggtatgactaaaagacatgagcaaacagactagctagactagactagttttctcttggtgagactttgttcattcattccttcctcccttcctttcttctcccctcccttccggaagaaaacagacaggtaaagatttagaaagaacaatggagagtaaataggatactaagtctgagatactgcaagttacgagaggaaaggatggtcacaatttggaaggtctgacgaagtggtatgtcctctgggtctatccggattttagttcgggcaaagagctatgaggaacacttcataaaagggagaatttggtgactatgacacatttccacagaacacaatgtgttttattttaatttcttcagtggagattttttttaaagtaccttaaaaccttttgttaaggattacacaggggctacatgcaaatttggagtacaattctatagcaaaaacatactggttattttagtgaaaatggcctacagcaaattttcagtttcagataacaaaatatttaggtctacagcttttatattctcattgcaggtgacacttgaattacacatttagacagcttaactatttctgtcttgccagagaaatcacataaataaacacaaaaataactcaattgttaaattctcttaggtatcctaactaggcacctaaaaactaacttaaaggaaagtacgatgacacagagctgtctctcaggtcttatggcttacatatatgaaaaatgtgaggtatctttgttgaaaatatcctacttaatagctcataaagggtaaatactattcatatagggagaccagccaacatatagtgatagagatgatttaatttactaattggtgttcacatcacttcaatttgttaacctcagaggcaattttttttaaagtcagatctcacaaactaaaagacactttagaatgcccatgtcttatctggatattgtcattttactttgtcaaacttctttaaaactagtatttcgctagggagggaataagttagaatgcaacctagtggggaaatcctgcatttgctcaatgtccatagcttttacacagttccagatgttcagtacattaataatacactaactcaaagcctctttttgaaactttagaaagtgcaaattgcattaagacctctttgccctcattagtggtattgttacaatcccagtcctctggaaaatgttttttggcatgtgtttaactttataatattgccatttactcactttaatagccagtactcaagtcttaatgcttttaataggcctgcctaaacagactaccatcttttgtaatcttactcacataatttatttcataagtagaacctggtatatttttccatctaaagatgattcttcattattcatttcatgaggtactcatatgttttaaatgtttactttcttttattcagttgatatgtacccatatgtggcatatgttagaaataaaaaagagttccttttaaatactaataaaaatgaaaaagtagtagtgttttttaaataacttttttagttacagtaaaaatgaatgtccttaatttttgctaaatacaaactgaaaatataagaaaaccaagaatatgaatttctattgaaacagcttcctgtttggtgatatttgactcagcactttcacctcaagaggctgggttatatttcagaatcaaactttcaatgaacacaggtgcagttggaggtgcacttggaggaataatatagacaaatactgccctaaagtgaaagtaagacctctgttggcaatctaactggaaatgaagatcctacagccctctctgaaaaggaacactctctctcataaattagttaaaatactgaggactctgaaaatgtcagagctgcactactagtgcagtaatgcactagtgacacctgatttacagttacttcttgatacattctgataaaaatatacaatgatatttacaatgcaaaaaacttcaaaaaatgacatttgtaaaacaactaacatatttacacatgaaattctactttcctgaaatcatgtgaaaagaaaacaataaaagccagacgcggtggctcacacctgtaatcccagcactttgggaggccaaggcagacagatctcttgagctcaggatttcaagaccagcctgggcaacatggctaaaccccatctctacaaaaaaaataactgggcatggtggtatgttcctgtagtcccagttacccaggaggctgaagtgggaggatcacctgagccagggaggtaaagactacagtgagccagtgattgtaccaccacattctagcctgggcaacagaatgagacactgtcttgaaaaaaaaaaagagaaaaaagaaaagaaaacaataagaactcaatactatgttatgtatggaacaaattcttaactctttgaaacataaattctgaattactgttgtttcatcaacagttaattcatcaatgtctaaagtaatcatttagttaaaatgtatataatctgacttgttttgctttttaaaaatgaagaactgttgactgagttaataatgttggctaaaatctgaatgtataaacttattcacacaaattcaactatatgtttcattcttttcctgaatagattaactgtaggcgaaaaaggcaactcgttttctatacttctgtaaatgggctaataattaaactataatgaagtcagtgctcttgcactattagaattcaggctgagggaagcagatgaataagaagcaaccactataatgttacctaaaagttactactttcaagtattgccatctgaatctgctgtaaatttgttgctctaaaacttgaaagaaattttttggagaaagcatcgcttcacaatctagtgaataagatccaaaagaaaaatatttaaattacagtgcagtgcataacaaacatagaaaggcctcaaggcataccactacaggaaaccatcaaatcacaaaggaagacagcaagagaaataaagaaacaaagtacctacacaacaactagaaaataattcacaatgctgggtgggcgtggtcactcatgcctgtaattccagcactttaggaggctgaggcagaaggattgcttgaggccaaaggattgcttgaagccaggagtttaagaccagtgtgggcaaaacagcaagaccctatctctaaaaaaaaaaaagtttttaaaaaatgtatctgggtgtggtggcacatgcctgtagtaccagctactcaggaggctgaggttgatcccttcaacccaggagttcaaggttatagtgacctatgatcacacccctgcactctgacctgggtgacagagcaagaccctgtcataaataaataaataaataaataaataaataaataaatggcagtaataactctttacctttcaatacctaccttgaatgtaaatgaattacactctagcaaaaagacatagagtcttaattcccagagcaatttagaaagagtaagaaaagaagatccaactatatgctgcctacaagagatttgcttttaaggatgcacagaggctgaaagtgagcagctgaaaaaagctattcaacaaaatggaaaccaaaagagagtggggttatctatacttacataagacaaaatagactaagtcaaatactgtaaaaagaaacaacgaagaacattatttaacaaaaaaaggtcaattcatcaagaggatataacaattgtaaatacacatgcacctaacatcaaagtacctaaatatataaagcaagtattaaaggatctgaaaagagagatagattctaatacaataatagtaggagacattgataccccactttcaacaatgaacaaatcatccagacagaaaatatatttaaaaacattggacttgaataaatttagaccaaatggacctaacaggcatttacaggcataccttggagatattgtaggttcagtttcagaccaccacaataaagcaaatatcacaataaagtgagtcatacatttttgttacccatcatatataaacggttaatgtttatactatactgcagtctattatgtgtacaagtggcattatgtctaaaaaaatacataccttaattttaaaatactttattgctaaaaaaatgctgacacagagacatgaagtgagtacatagtattggaaaaatggtgacaatagacttgcttgacacagggttgccacaaacctttaatttatgaaaaaaaaaaaacccagaatatttgcaaagtgcgataaagcaaagcacaataaaataaggtattcctgtacagaatatcccattcaagagcaacagaatacacattcttctcaaataccataaaatagtctccaggatagattatatattaggccatgaaacaagttttaacaaatttaagtttgttatcatatcaagtatctttgctggccacaatggtataaaactagaaatgagtaacaggaaaatttgggaaaattcacaaatatatggaaattaaacaacatgttcctgaacaaccaaacaaccaagggggcaatgaagaaattaaaagggaaatttaaaaaaaatatattgagacaaacaaaaatggaaacacaacataccaaaacttaagggatgcagcaaacgtagtcctaagaggaaagtttacaataacaaatgcctacatcaaaaaagaagatcccaaataaataacattactcctcaaggatctagaaaaagaagaactaagcccaaaattaacagaaggaaagaagtaataaagatcagagaataaataaataaagtagagactaggaaaacaacacaaagatcaacaaaactatgaattggtttttgaaaagataaatgaaatcaacaaacctttagctagattaacaagaaaaaaagagaatattcaaataaaatgagaaacaaatgaggagatattataactgataccacagaaatacaaaggatcaaagtgactattacaattatatgccaacaaaataaactggatacctggaagaaatggataaattcctagacacatacaacctaccaagactgcatcataaagaaatagaaaatttaaacagaccaataatgagttctttccaatcaaagaaaagcccaagacctgttggctcactgctgaattctacctaacagttaaagaactaataccaatcattctcaaatgctttcaaagaagttgaaaaggaggatatacttctaaattctttttacatgaccagcattatcaccctgataccaaggccagataaggacaatacaagaaaagaaaactgtaggccaatatccttgataaatagaaaagcaaaaatcctcaacaaaatactagcaaaccaaattcaacaacacattaaaagaacaattcaacatgatcaaatgggatttatcactggatggaaagatagttcaacatatgtaaatcaataaatgtatacagcacattaatagaatgaaggacaaaaaccatatgatcatctcattagatgtagaaaaatcatttgacaaaattcaacatcctttcctgagaaaaacttttactaaattaggtatagaagaaatgtactgcatatttggccaataaaggccaaatatgataagaccacacttaacattatattcaatggtgaaaaaattgaaagccttacctctaagatctggaacaagacaaggatgcccactttcactatgtccacttaacacagtactgaagtccttgccagaaaaatttagaaagagaaagaaataaaaagcatccaaatagaaaagaaaaaagtgaaactgcccctgtttgctgaagacataatcttatatatagaaacccctaaagactacaacaaaaaactgttagaactaataaatgaataaatacagtaaacttgcaggatacaaaatcaacacacaaaaaatcagtagcatttctatatactaataacagactatccaaaaaagaaattaagagaactccttttacaatagctaccaaaaagagagagaaagaaagaaagaaatttaaccaaggtgaagaaaggcttgtacgctgaaatctataaaatgttgatgagagaaattgtagaagatacaagtaaatagcatgatattctttgctcatagactggaagaatattgttaaaatgttcatattacccaaagtgacatattgattcaatgtaatctctatcaaaattccaatgtcatttttcatagaaatagaaaaaagaatcctaaatttcatatagagccacaagaagctttgaatagccatggcagtcatgagtaaaaagaacaaaaatggaggcatcacacgacctgattccaaaccacactgcaaagctatagtaattaaaacagcatggtattggcataaaaaacagccacagtgaccaacgaaacaaagagcacagaaagaaacccatgtatgtgctcaactgattttcaacaaaggtgccaagtatacacaatgggaaaaaaagactctctaaaaatggtgctaagaaaattagatatccacatgcagaagaatgaaaatggacccttatctcacaatatttaaaaaaaaactcaaaatgaattaaagatttaaacccaagaactgaaactgtaaaactactagaagaaaacagaggggggaaaactacataacattggtttaggcaatgattttttggatttgatcccaaaagcacaggcaacaaaagcaaaaataggccaatgcaattacaacaaagagaaaacaataaacaaagtggcaacctacagattgggagaaaatatttacaagctatatatccaataaggagttaatgtccaaaatatataagaaactcaaacaactcattagcaagaacacaaataactcaatttaaaaatgggcaagggatttgaatagacatttctaaaagaagacaacaaatgaccaacagatacatgaaaaaatgctcaaaatcactaatcattagggaaatacaaattaaaaccatgatgaaacattaccttatgcctgtaacaatggctactgtcaaaaagatgaaagataacaaagtgttggtgaggatgtggagaaaagggaagccttggacactgttggtaagaatgtaaattagtacagccattataaaaaactgaatggacattactcaaaacactcaaaacagaattaccttatgatctagcaatctcacttctgagtatttacccctaaaatttgaagtcagtttgcagaagaaatatctacactccctcgttcactgtagcattgttcatttggctggaattggagaacattatgctaagtgaaataagccaggcacagaaagataaatgtctcatgcccttactttacgtggcatctaaaacaactgaactcaaagaagtgacagtaaaatggtagttaccagagtctggggcaaccacccttctactttctatctctgaatttgactactctaagtacctcatataagtgtaatagtgtatttgccgtttttatgacgagcttatttcacttagtctaatgtcctccagattcatccatgttgtagcatgaaaagaaatacccatttattatctcacagtctctgtaggtcagaagtccagacacagggcagctggtatgggaatgtggggaaggttgtgcatgtgtcgggtaaaggggtatatgagagctgtctatactgtccactcaattttgctgtgaacctaaaactggtataaaaaataccatgtgacctatggtattctctacattgagctgctatctgtagaatcttttccttgatgacttttttcctttatgatctctcatgttagcatgacttcaagctaacattatctacactaggcaagcaaggtgaatcttatttctaaaaactcctcagaaatagtactttgtacaaaggcaaacaaccaacgcactgatatgagctctaaccattcattcaccatgtcctgtagagactgatgtatcttttgaaagacttttcaaaaatgcaataacccttgagttaactagatatcttaaaatcgaaggctagagattgggagagttcgcttctataatttgcatctgctgtatatttgagaatatataaaatacaagaacccaaatagatgggtgaaactcttaaaatgttaaaatcgtagctagaagttagaaacctgtgtaagccatattaaagagataaagtaagtacagcatttctctatgaacatagatgaaaaaggatggaaagacactagatattcaagatacactacatatacatgaggtatcaaatatccaagatacattaaatatatctgaggcatataaaatactacccaatatccataaaatcttattcagccacccattggtgacacccattctggctccatgtatcctctgcccaagaaaggcaaataaaatacattgtagctcagcaggcaaactgatggactacagctgtggccaagtgcatttgcgctggccttactctaataaagtgtgtcaattgtgcatctgttgggtccccttgcataaacctcatttctagtctctgtaagcacaccatcagcaaaggagagctgatgtggaaaagagaaagacaagacataaacattgcacagcccaggatttaggtagtgtggtccttccacccacttacattgtattcacatgttaacctaccctcaactctctccccttgcctcccactgtgtgttttaactatctttactaaactatatgattcaagcatcccaatgtggtgtcacttttttgtcccatgacctctgggataagtatatttggagactaccactgcatcaagttaacgtccctcctgacaccacacaaatcatctaaattcaaaaggtgccaatatgaaactgtcagccaaaaaggaaaatcaattggttgctattatgaagattaactgggtagatattaaagattgtaaccaagatgaaacaactagaacctccaagtttttctagtccatatcaagctcaaaaattgctttaatatgtaaaatgtacagtaaattaatcataagttatatttaactaatttgtctgtcatttcccaaaagtgcttcctatatttatccttacatccatgaaaaatagtttagaactaagggggtggggggagcacagggagttaggatgaattcagcttctaaatttgctacttgatccctgcctgctatggtttgaatgtcccctcccaaagtcatgttaaaatgtaattgtcattgtaacagtattaacaggtgcagcatttaagagaccattaggccagaaaggttctgtcctcatggatgggtttaatgcctttaaaaaataaaggagctttttctttctgtgtcacttgccctttcacctttcacctcgagatgatggagcaagaaggcccttactagatgctggcaacttgatacttggacttcttagtctccagaattgtgagaaataaatttattttctttctgtccagtctgtggtattctgttatagcatcaaaaaattgaccaagacactgccttctcaaactaagttacctggacatccttgactctagtttaatcttaacttctctgcctttattctccctagatttttcacttaaaaattataatacatatacatacataaacacacacatacacatatacacatacatatgtatgtgtgtgtgtgtgtgtgtatatattatatatatatatatatatatatatatatatatatatatatatattttttttttttttttttttttttttttttgagacagagtttcactcttattgcccaggctggagtgcatggcgtgatcttggctcactgcaacctccgcctcctggattcaagcaattctcctgcctcagcctcccaattagcagggattacaggcatgtgccaccatgtccggttaattttgaatttttagtacagacggagtttcaccatgttggccaggctggtcttgaactcctgacctcaggtgatccaccctccttggcctcccaaagtgctgggattacaggcatgagccagcatgcccagcctaatcaatatatttttataaagcttttttgaaaccagatgtgatacaaatatattcatgttatttatagaaagtacataaatgactatattcatgcacacacacacacacacacacacacacacacagagcaaaaaacaacttggttattaaattgttactttccaactgccctactattttcattcaattgttaaagcagctttttaacatcctctttcagagtagctcttatatctatcttcctaacagtttagctcataatcaaaaacaaatgtgaaaagcaaacataaatataggtataccaatatgtaggtatttttatataagtgcatattgttctaaataaaaataataggtcaaattaatatttatcagatcaactatatttcaaacagtagaatactattacgaggatagcattgaactagaaaatcaggagttctaaggcaaatgctttcactaattaaatgtatgaccttagccatatgaattgtctactcagaatgtagtatgtgcccagtaaatgtttgtcaaatgaataaacaaaggaacaaacaaaggaatactttttgtttaataaccaagagcagaagttctcaagaactacatctaacctgagagatatacaacctctctaccacatcccaaagcctcaatggcataatgattctttctatttaacactgtagaaaaaaatatttcttcaaaaggctcagttgatcacttaaagcaaatttatatctatagaaatttcagccttctacacgaggggaaaaaaaacactttttaatgtagcaatttagtttctcctttaggttaagtgcggtacagctttaaaaatgagaaccaaaacaaactagtagcactgcaaatttcttaacatacaaatttagtgctgaacaatactttaaaaaactacagctagagagtgaacaggaatgtttgcattttattcctcatctgacattcagtgatgaatgtaaaatatgccctcagggaaaatggtttatacatattactcataaagatgtatttttttttaagtcgaagtctgtattgtatgaataaaaagatccaacttgttactttggcaccagagagtctcttttcaaaatgatttaatagaaaagtttctattctctttatatggacagaaacttctctgtccatataaagagtttagaaactcttctacccataaaaatgaatttcagagagttctaaagcaatgctgctactacttaaataacaacagagtcaaaatcaaatttatcttagtggaagaatggcattcctcctagttaccataaactattggtctgaaagaatgtggggaaaaaaactagatgaacaacgttctcactcttacccttaaacaaatgctgcagtttacatcaaaagaatattagtttttactcagtgaaagagtaaagttttgagtaaatcacccattccaattatctagtacaggaagaaaactggccattaaatataagggggaagaaatgaccactaaaatgtatggtttgaaaaactttagacatatatttttcttttttagagatagggtcttgctattggccaagctggagtgcagtggtgtgatcacagctcactgcagcctcaaacttctgggctcaagcgatcctcccatctcagcctcctaagtagctgggactcacaacaccacacctggctgatattttttgttttgtttttttaaacactgggtctctctatgttacccaggctggtcttgaacatctggcctcaagtgatcctcctatctcagcctcccaaattgctgggattataggcttctgcactgggcctagacttctaccatatgtttctttctttctttttgatttttagtagagatgaggtttcaccatgttgcccaacctgatgtcaaactcctgagctcaggcaatccacccaccttggcctcccaaagtgctgggattacaggtgtgagtcaccgcacctggcccttatcctatgtttcttttatgaaactctgcaaccagtctttacattacattttcacacatgccaagctaaactctgtgattatgaaaatattttctgtgcctttgctaatacatgtctccttggtccagaatattatattcctcactcccacatctaccagtagaaatctatccacctttctttaatacccactgaaatatcaaccacctcctctaggaaactcctctgcttcattcaatcacatgtgatctcttcctactcttaattccattatcattcttcttaatctctctaatgattacaaattttgtcaaataatgcaaggatgtgtacacttattttataccacaacccaaactgaaatcttcttgaagagacagtaacttgtttatttttgaatctttaacaggacttagtgcagtcctccgcacaaagtatgtactcaataatgatttcttcaatggattaagtaaataaaaataaatgtgaagtaaagttatgagatttctcaggaagatcttaaatataatataagcaaggctctcaatataaatattttggtattttaaagaaattcaactaaagatatttaaagttctttctcaatacaaaataagtattagtatatggaattaggctgtattgctctacgggaaatcacaggaattttagtttgcagttctaaaatacctctaacttcaaaggcagtaagaaagacttggaacaataagagttagtctccatccattcgtgtgtttattcatcaagcatttatggaaagattattatgtgcagttgtgatgcctttgctacctaaatttcataaatatcatttcacttctattaatattttcatatgccatagtcacaaatctttattctaatggttcttcctaacctttttcttaccctgataaattaacccctgtgataaaaagtttatgatagcccctaagattcctactccctatatacaacctgcataaacttctccccgttgtgagataaaaataagactttacttccatgattagattatattatgtagtaaagatgaggggattttatgaacgtaattaaggtctacctcaattgattctgagttaatcaaaagggagattatcttgggtggacctgacttaatcaggtaaaagtccttaaaagatacaatgcacccctacagaagagacacctttgttggctttgaagaaggaaaaaaaaaagtagtagtagtaataagctgccacgttgttgagagggcgatatgactaggacctgaatgcaacctttaagacctaagagtcatccttagccaacagcccgcaaaagactgggtatctcactcagtcctacgactacaagggataaattctgcaaacaaactgagggaccctggaagctaatctttccccagtcaagcctttagtgagaccacaaccccagttgactctgctgggagccttgtaatacactgagaagaaaaacccagataagccatgcccagactcctgacccacagaaagagtaagatgataaatgtgtactgttttacggtgctaattttgtggtaatttgttatgcagcaacatagaactaatacaacccatctaattatatttcaatcctggttcctcatgtccccctgaaatgaattctaatgtaggctttctgtcttctgcatggtcagtatcaaacccctctgaaatgaaaactagatggcataatattaatacatttaataactgtagtcactgtactatgtgagaattgacaacggtactgacaaaagattataataatgtgctagtttgctcttatgactagattctgaaactcagtagcaaatttatttttgccaattttattggacttctgatttcagctccaatatgtaaagaactggaagtcatcacacctgttttacaacagaaaaaagttaaacaaactaaaaatcaattacttttctgggatccatctgagaactgaggtcacaaggcaaactgccaccctgaaatctggagagacaggtaaatacagagaatcaagatatgcttactgggacagcggccactaaaacataaattgacagaaatagttaaaagataatattgatgaattgctggagataaaatgtgaactagtttataagtgagaaactcctaggggctgcagtcttgccagggggcccacaatttttaagacattacctctaaaaatcccaccaggttcccacagtaaagagccaagaaaaaccctactgtttcgggcaggaggagggaaaaaaacaaccattttgaaatacgttcaacgcattctctaaaacaatggccagtctgccagtaaggaagattttaccagatccttatccaacatgagggaagggatcatttcctaaactgcagctccctgccatctaatcttatgatatgaatgaagagctcagaaacacttgtgaaggtcacaggcaagggacacagtcatgctaaaagactgagacataatcataggattagaagatgcttcctgttccccataccttaccaccacatcaacagggctccagtataacagcagaggattacaacagagagagacagctgcaaggctcagattctatttaagaataagtttttagggacattggagagtaactcaagtccacattaagaattaattaaagagcactggtcaagataactacaaggtagttataaaagacagtataaaatgtgttttaacatagatacaaaagacaatataaaatgtattctgtttttaattttttttatctgatttgaaagtcagttgcaaaaggtaataattgtaaatctgtgttgagagacatacaatgtgtaaagatgtaatttttataataatgacacaaagaaggtaggattaaaaaaacagctacataggattaaagcttctgcattctattgaaaattaaattagtattaatccaaactacataagatgttaaatataattcctaggacaaccactaagaaaataactaaaaaatacacagtaaaagaaaagccaagggaattaaagtgacacattagaaaaatttaaatggcacactagaaaatatctatctattagattcaaaaggcaatgatagagaaatagagggggaaaaggcaccagatatacagaaaacaaacagcaaagtggcatttgtaaacactaccttagcactaattacattaaacgtaaatggagtaaacactcaagttaaaaggcagagataagcagaatgaatttttcaaatgctccaactatatgctgtctataagagacacactttaaatttagacacaaataggttgaaagtaaaaggaatgttattcagccataaaaaggaataaagtattaattcatcctataatgctgaacatggaaacattacactatgtgaaaaagccagacacaaaaagtcacatattgtatgattcaatttagatgaaatgttcagaaaaggcaaatctatagaaatagcagattagtggatactagggaatagcaggtaagagtaggcagtgactgttaatgagttaggagtttctttttggggtcagaaaaatattctggaattagacagtggtgatgattacacaactttgtgaatatactaaaaatgactcaatgcaaaaatgcgcaaagaatttgaataggcatttctctaaagaagatgtctgaattactaataagcacatgaaaatatacttaacatcactagtcatcagggaactgcaaatcaaaaccacaaggagatactacactttatacccatttgaaaggctattatcaaaaaaaacataaaataacaagtattggcaaaaatgtggaaaaattggaatccttgtgcactgctgatgggaatctaaattatgcattgactataaaaaaaacagtttggtggttcttcaaaaagttaaatttaggctgggcgtggtggttcacgcctgtgatcccagcactttgggaggccgaggcaggcagatcacctgaggtcaggagttcaagaccagcctggccaacatggtgaaaccctgtctctactaaaaatacacaaaaattagccagacatgttggcggacacctgtaatcccagctactcgggaggctaaggcaggagaatcactggaacctggaaagcggaggttgcaatgagctgagatgatgccactgcactccagcctgggtgacagagtgagactccatctcaaaaaaagaagttacatttagaattatcacaagatccagaaattacatttctaggtatatatccgaatgaattgaaagcaaggtcacaaatagatatttgtacaccagcgttcatagcagcattattcacaacaggcaaaaggtagaaacaatccaaatacccatcgacagatgaatggataagcaaatgtgagattatatatatatatatatatatatatatatatatatatatatatatatatataaaatgaaatattattctgccataaaaaggattccgatgtatgctacaagatggacgaaccctgaaaacattatggctaatgaaataaatcagaaacaaaggacaaatactgtatgattccacttatatgaagtagctacaatagccaaattcacagagacagaaagaatactagagggtaacaggaaatggggaaaaggaatctggggagttattttgtgggaacagagttcttatttggtatgatgaaaggttctgaaaatagatagtggtcttggttgtctaacattgtgaatgtacttaattgtacacacacaaaaaatgctaaggccgaacgcagtggctcacgcctgtaatcccagcactttgggaggccaaggcgggcagatcatctgaggtcgggagttcaagaccagcctgaccaacctggagaaaccccatctctactaaaaatacaaaattagccgggtgtggtggcacatgactgcaatcccagctactcaggaggctgaggcaggagaatcacttgaacccgggaggcagaggttgcagtgagccaagatcacaccattgcactccagactgggcaacaagggtaaaattccatctcagaaaaaaaaaaaaaaaaaaaaaaacctaaattttgttatgcatgtttcaccacaattagaaatgacaataaatatcagaaaaataaatcaaagacctgcgaagcctctggggatgtgggactgggaagaaaggaggagtagtatagtgaagggagctgttgttttttcattataaccattctaacattatttaattatgtataagaattattttgataaattaagatatttaaagctaaaaaagaaattaaagaatttaatgacaaacaacaaggttttaatgatatgtattataaaggattactatccacactatatatttaaaagcccatacaaatcaattaaaaagacaaatacaaccaagacaagcagacaataaacaaaaattttaaaagaattaaacaaaaacctgcagaacaactaattgacaaacctgacaaaaacaaaacctgacaaaacctgacaaacttgataaaaacaagcaatggggaaagaattccctatttaataagtggtgctgggaaaactggctagccatatgtagaaagctgaaactggatcccttccttacaccttatacaaaaattaattcaagatggattaaagacttaaatcttagacctaaaaccataaaaaccctagaagaaaacctaggcaataccattcagaacataggcatgggcaaggacttcatgactaaaacgccaaaatcaatgacaacaaaagccaaaattgaaaaatgggatctaattaaactaaagagcttcagtacagcaaaagaaactaccatcagagtgaacagcctacagaacattctgtaggctcccatccctacagaatgggagaaaatttttgcgatctacccatctgacaaagggctaatatctagaatctacaaagaacttaaacaaatttacaagaaaaaaacaaacaaccccatcaaaaagtgggcaaaggatatgaacagacacttctcaaaagaagacatttatgcagccaacagacacatgaaaaaatgctcatcatcactggtcatcagagaaatgcaaatcaaaaccacaatgagataccatctcacaccagttagaatggtgatcattaaacagtcaggaaacaacagaagctggagaggatgtagagaaacaggaacgcttttacactgttggtgggagtataaattagttcaaccattgtggaagacagtgtggcgattcctcaaggatctaaaactagaaataccatttgacccagtcatcacattactgggtatatacccaaaggattataaatcatgctactataaagacacatgcatacgtatatttattgcagcctattcacaatagcaaagacttggaaccaacccaaatgtccatcaatgatagactggattaagaaaatgtggcacatatacaccatagaatactatgcagccataaaaaaggatgagttcatgtcctttgcagggacatggatgaagctggaaaccatcattctcagcaaactatcacaaagacagaaaaccaaacaccgcatgttctcactcataggtgggaattgaacaatgagaacatgtggacgcagggtagggaacatcacacactggggcctgttctggggtgggggcctaggggagggatagcattaggagaaatacctaatgtaaatgacgagttgatgggtgcagcaaaccagcatggcacatgtatacgtatgtaacaaacctgcacgttgtgcacatgtaccctagaacttaaagtataataataaaaaaagaaactatgagataataaatgtttactgttttaagccacaaaaaaattaaacaaaaacctgcagaacaattaatttcgcaatcaaagaaataaactcaattggaacaaagtatattcgaaggatttcctgtgtctttatttttaattgaaaagctagaagcagaaaaataatctattcattttgctaatatatatacagtcactaaaaagttatttcaatgttatagtctctagtcacccaattataaatgtctgtaactaaaattcatactgtctgctatatgcattccaagcctagcagaaaaatgtcacccagacatctcctatctccctttttgtgactatgactggaaaatataaaaaggttttagcaatgaaataagattttgctttaatcgcttacataactgtggagtgagtacagtttccataatcccataaataacttttcttccaatttcccggaagatatttgtctccatatttaagaattaaaagtcctaaaaattttattaggtaagaccaactccctacaagttttattgtatgacttagtatcaagcttaattactagttttcctaaatataactgtttggtgtagatgttcacactggaataaatcttgttttccattaagaattttaaaaaatgtttatgtccgttttatttttagatattcttgtaaaaaattatctgattaaatatgtttttgaaaacaaatcctttaatttatctacaagagactaattgctttagtgtatccctagctatcaaagtacatatatataaaaagacagtagaagagtcaaaagtatcaatattgtcattcaaatatattacttccaaatgcttctgtccttagaggtataacttcctgtggaaaaaagagaagggaacgccacttctctacattggatttaggttagattttgatgcaatgtgatgttactttcaggaattataagtggtttcaatgctttgaatgttaggaggaccaaaatatactaaataatttcaaattaactaaaaaaaattattaaaaatcagtgactctaaaaacaacaacaaaattcttctggccagatacatgaagtaaaatgagggcaacgaagaaagtttggcttagattaactttaatgaaaccttcagaaatgtaatttatgaaaataaaaaagaatgctctgtttctttctactctgaaaatatcgacttgtccctaagaataaaaatgtacacataaacacttctcctatataattaacattgcttgaagacttttattctttcagattattttattttattttagagagagtcttattctgttgcccacgctggagtgcaggggtgcaatcatagctcactgtaacctcaacctcctgggctcaagcaatcctcccacctcagcctcgcaggtagctgggactataggtgtgtgccaccacacccagctaatttttgtattttgtagaggcagagtttcaccatgttctccaggctggtctcgaactcctgggctcaagtgatcctcccagctcagcctcccaacctgctgggattacaagcatgagccaccacgtccagccttgctctttcagacttttaagtaaaacagaggtaggacaatcaggcagtatcttaatcaaaaaataagtaaaataatatgtgatgtttagaaaactatagttattaccttgttgcctctaccctaggaagcttactgtggtaattttaaaattagcatgccaatgtttaaaatgtaaatgattatttaaaggcaaaagaaacaataaatattcccttaccttgtaagatggcaagaaacacaaaattccttggctcacagtctggcacacagataacaaaagtgctcccacttcatcttggaactcaaatgtttcagtattctggaaggtagcacagagattccgacccttggggcctgacccaatggtaccaacccaaacctagaatatgaatatgtcattattagagttatgcctgaaaaaggcatggaaattagtatttatttggaagtatgtacataaaagatcaagcaacaagtttaacaatttatttttaaattgtcagggggttttctattaccttcaattaactgtatacagatttaatttataaatgttttgctttaggcagatcactaaattctcttagagtgaaaattctttgaaagcaaaacaggttgtacctgtctctgtttacttaatagctttgcaaaatttaagcatgtaacaaatttttgttaggtgaataaatgaacaagtgaaatgatgaatatataccaatagcagaatcagataattccaaaatactggggatgaaggccagtataatttgccataggcaagtctcaaaaatgacaggaactactctttcaaaaattcattggtgctcaaagatccttagtcatagaaaaaaatcacacccaccacatcttacagttatttgcaattctatctcccttatatgtagagagagggagagagacgaaaattttgcaaaatgttaacaagtgatgaatctaggtgaaggatataaagatattcacaatattaatattatctttccaacttttctgaaatttctaattttttgaaatacagttgaaagaatcaatgaatgaatgatcaaaatgtagcattgagtagaaaaaaacaaactttttcctttgctctcacaccacagcaatcaacacagaaaacttctgtgaccaaatgtgtgggaggttttttccacataccaagcaatcaattctgcaacagacatcaactgggtgtcctctaattcaattcaattctgatactatctactgggagatgataacttcagatcccagaggttgagggctcagtccccaagactgcccctgatttctgtggccagtcacagttgtttttacttgcacttctgactgatcagctagaaatcgggcatcccacaaccctctgcttgggttcaattaatttggtagagctgctcacagaacccagggacacatttacctacacttactgatttattagaaaaaatattacaaaggatacagataaagagatgtatgtgggaaggggctcagagcttcaattcccaggcacatcaccctccaagtgttcaggaacctccaagtgttcagctatctggaagctctctgaaccctgtccttctaggtttttatggaggcttcattatgtaggcatgattgattaaaccactggccattaagataaacttaacctttagcatcatctcccccaagccctccccagaggttgaggaatgggggtgaaaatcccaactctcctatcatgtcttggtcttcccggaggccagccctgatcctgatgctacctaggagccccctaccattagtcatctcattagcatacaaaatgtcactttggagattctaaggattttaggagttgtatgccaggaaatggagtggaagaccaaatatatatattataaatcacaggcatatacacacaagaaacattattcacctttaaagaggaaactctggcacatgctacaacatagatgatgaactttgaagacattatctgcaacatggacaaaccttgaggacattactaagtaaaataagccagtcacaaaaacgacaaatattttatgattccacttatatgaagtatttatagtaatcagattcatagaaacagaaagcagaatggtagttaccaggagctgaggagagggggagaatagagagctgttgtttaatgggaacagagtttcagtttttcaagaggagaaagtcttgagattggttgcacaacaacatatacatacttaataagactgagctgtatactcaaaaatggttaagatggtaaattttatatatattctaccacaattaaaagttttttaaattttaagttgaaggaaaatattacagtgtaacagaatccagctgcacaactacattattataattcagcgacattataggttaaatggacttttgtgcagtaggctgagaacatagagcctgtaataacattcttatgagaaaacgtatgctgaatttaccaacttcccatatttatctgtgtctctaaagaaagcaacttgaaaacgtggaacatgtattcttccttcactgctgttcatagtcacatttctcagcaggaacactctggcatttggaaagcacaattcttagttacataggagtagcattctaggttcccaactaccaaatgccgtagttgctcccaagtaattgtgaggaccaaaaatgttcccacctataaacctgtgtatatagcttaataaagagctagcattgtgttaggcacacaggtgatgttaacttaaccactttagcattaaccacagcttaacatcacctgtgtgcctaaccactttaaaatatttcataaaaagaaaccagaaggcataatgaaaaataacaatctatacatttccacaaaaattaaaataacatttagtagccatcgttataaaacattaaaatcttaaatcataggactcataagagtacttttaactcatttcagatattcaaacatgctgaacacttgctaaataccagctattaatctaggcacagaggaagaacgtggatgtaaaaggaagaatcaggatacactgtagtctaatggaaaagagaagcataaataattatacaagctgggcatggtagtacatgcctgtagtcccagctactcaggaggctgaggcaggtggactgcctgagcctgggagtttgaagccagcctgggcaacatagcaagcgaccttgtctctaaaaagataaagtctggccaaaatggcaaaaccccgtctctactaaaaatacaaaaatgtgccaggcatggtggcatacacccataatcccagctactcagaaggttgaggcaggagaaccgctggaacccaggaggcgaaggctgcagtgagccaagatcgcaccactgcactccagtctgggtgacagagcaaaaccttgtctcaaaaaataaaagtaaaaataaaaatacagagataaaataaataaaatataaataggctgggcacagtggctcacgcctgtaatcccaacactttgggaggctgaggcaagtgcatcatttgagggcaggagttcaagaccagaatggacaacatgctgaaaccccatctctaccaaaaaaataaaaaattagccaggcgtgcggcgcacacctgtaatctcagcaacttgagaggctgaagcaggagaattgcttaaacacgagtgagccaagatcacaccactgcactccagcctgggcaacagagccagactctgtctcaaaaatcaatcaatcaataaataaaacataattatacaatgagaattaaagaaatcaaaattttgttttcattacaaaactaaaacttacttagaagaagaagctgaaatacagccttttgcatcccaagtgactggattatttccttctgttgacacatcattaagtagctgacagattttcttttattgtaaaactggaatgttgaatttcctaccaagatttacttgctggcacttcaggtatcttctaacttgtttacatagttatattgaagtagaaacactgaaggccttccaaaaaaaaaaacaacaactaacctgtgaatttttaatgatatgattagcctccagctggatagtaaatgtaacaccaagttctgacgaaaaggatttcattggtgataatgtaccagatgtcaaaacaatggtctgaactttgccattaatatctgaaaaggcctaaaagaaaacaacattagataaataaaattatctttagaagaggctgggcaaagtggctcacacctgtaatcccagcactttgggaggctgaagcaggaagatcgcttgagtctaggagtctgagaccagcctgggcaatatggtgaaaccccgtctctacaaaaaatacaaaaattagccgggcatggtgacacatgcctatagtcccagctactcgggaagctaaggtgggaggatcgcttgagcctggaaggtcaaggctacagtgagctgagattgcaccactgcactccagcctgggtgaagagcaagaccctgcctcaaaacaacaacaacaacaacaacaaacaactatctttaaaagagtcaaccacatttattaaaatgctggtactgagcaagaagacaaaatttccatttacatgatgagcttaccacagctggatttaagcaccaaaagtttagcacatgaactgcagttttctgtcgtgaacgtttcttattttttggtagaaccaacaacccatttttgtctgaaatatcaatctgatttgtccaggagtaagtctgttgaatcgcaattttataatcatctgcaaatctagatgcaaagaaagtgctaattaagtggcaaaacttttaaaacctatgacccagctacatacaatataaaaactgattacattaaaactcatttgaaagagctggtaccttcccattcaaaaataacattctccttaccattaattaaattcagtaattctgatattaataaagccattaatcatagaatcaactgattctcagagggaatattagaaatcatctaaccatctatcttttatcagctacttcctaacctcattttcaaacattacatatgtcatggcagaagcagaattaaaatccaggcctcctaactcccagtccagagctctctgcatgctctactacatgatgagttacaaaatagaaaacagtattatggttaaagagactaaaaggtgggttatacttttttattaaatgagaaaatagaaggataatttttactgaaagtttttaaagtattagcaacaagttataaaattcttacattcctttgaaacctgagtctcagccttcatctacttttaatgaaggtgctgaaccagatgatatctgtgatcccatccagtgtataactgctttcaataagaatctagaaaatggttaagcttaaaaataataaaatgtggccaggcgcggtggttcacacctgtaatcccagcactttgggaggccgaggcaggtggatcacgaggtcaggagttcgagaccagcctggccaacatggtgaaaccccgtctctactaaaaatacaaaaattagccaggtgtggtggcagtcgcctgtaaccccagctactcaggaggctgaggcaggagaatcacttgaacccgggaggtggaggttgcagtgagctgagatagcgccactgcactgtagcctgggtgacggagcaagactccatctcaaaaaaaaaaaaaaaagtaaaatgtgatattctctaccatgtcttcgctatagtatttccttattcatttcactcctagagagattagatctcaaaattaaagttgggaacttaacaactgtggagagaatcttataaaaatactgggagccaaaaactgtaaaactcttaaaacaaaggggagaccgggtgcgatggctcacgcctgtaatcccagcactttgggaggccgaggtgggcggatcacgaggtcaggagatcgagaccattctggctaacacggtgaaaccccgtctctactagaaaatacaaaaaattagccgggcttagtggcgggcgcctgtagtcccagctactcgggaggctgaggcaggagaatggcatgaacccgggaggctgagcttgcagtgagccgagatcgcgccactgcactccaacctgggtgacagagcgagactcccgtctcagaaaaaaaaaaaaaaaaaggaaaagaaaacataggggaaatcttcatatcagatttggccatgatttactggatgtgacactaaaagtacaggcaacaacaagaaaagagaaagataaattggacttcaacaagattaaaaaccttttctgcatcaaaggacactatgaataaatgaaaaaacaacccacagaatgagagaaaatatttgtaaagtatatatctcttacaggactgacatccagaatatctaaataactacagctcaacaacaacaacaaaaaaacccaataattcaaaagtgggcaaaagacttcaatagatatttctccaaaaaaagacatacaattggccaataagcacatgaaaagattctcaacttctctagtcattaggaaatacaaataaaaaccagatgatatcacttgatacctattaggatggctattatacaaaaaataaaataacgagtgtcagcaaaaacaattctgatatatgctgctacataaactgttggcaaggatgtgtagaaattggaacccttgtgcattgataatgagaatggaaaataatgcagttgctgtgagaaacagtatggtgagtcctcaaaaagttaaatgcagcattaccatatgattctgcaattccactgctaggtacttatatacacccagaagaactgaaagcagaactcagatatttgtacaccaacgttcatagtagcattgtttacaataggcaaaagatgaaaacaacccaaatgtccattaacataagaataaattaacaaattgtggtatatacatacaatggagtattattcagccatagaaaggaatgaaattctgatatatgctactacataaatgaactctgaaaacactgtgccaaatgaattgaaataagccagacacaaaaagacaaacattgtatgatcgctcttatgtgaaatacctagaaaggacttcataagatgaaaatagaatacaggttagcaggtgatgaggggaaagactctaggggttattatttcatgggtacagaattcctatttggaataataaaaaatttctggaaatctctggaaatgagtacaatgtacaacattgcaaatatactgtacttaatggcactgagttgtatacgtaaaatggttaaaatggtgtattttatgtatattttaccacaataaaaaaaaaataccagaactaggtactactataatttaagttacaggatgagagggattggttgtttttcattttccacagttcatacaataaaaaagggactttctgacactgtaggaacataagaaaactttagcaatagaagataatttaatatgaattaattaaatatatttatttaatgatttcaatattcattaatataaaagactaattttggccaggcatgggctcacacttacaatcctagcactttgggaggctgaggtgggaggatcacttgaggccaggagttcaagaccatcctgatcaacatagtgagatctcatctctacaaaaaaaataaaaattaaaaaattagctgggtgtgggtgttgcacacctgtaatcccagctactcaggaaacaggtgggaggattgcttaagcccaggaggtcaaagttgcagtgagctgtgatcatgcaactgcacttcagcctgggtgacagagaagtccctgtctcaaaaaagcatcagactaatttcaattcctctaagtctgtgtcaataagagcaaatatataataatatctataacacttgttttcaattctcctatttactcacccaaaataggtatgtattaaacacatgctagcatccaaattaggctatttttaaaaggaaaatacatactagttatcttcacttacctgctattttgcctaaaaagatagtcaagtaccataaaaagtcctttaagcattatttgagttgatgcactaataacaggtacttctcttgcctcctctttaccataaattggtgagattttttcctctttttgaagaacagcagaaaaatgtccctataagaaattaccatattaagtatagaggggttgggagggaattggaaaaagaaacttctcaaaaatacaatgaaacccaacaaaacatgcattgaaattttaggtgaacagaattgctatagtttgatagtctgacttctccaaatctgatattgaaatttcatccccagtaatggaagtggggcatatcaggaggtttgggaccatgggggtagatacctcatgaatagattaacgccctccctaagtagagagggggtgagttagtgctctgttagttcccacgagagctggttgttagaaagagcctgacacctccctcccttctctctctcgcttcttctcttgccatatgatctgtacaaaccagctccccttcaccttttgccatcagtggaagcaggctaaggtcctcaaaattagatgctggagccatgcttcgtacaagctgcagaactgtgaaccaaataaacctcctttctttgtaagttacccagcctcaggtatttatagtgatacaaacaaagacaattattaacagcacaatgctaacaatatattttagattgccatattagcaaaattctcctcagagtcaaagactctttaataataagttaggtatttagaagattcaatcagggtattatttggtgcctttcagatgtaaggaattaaataaaaatgtagcaaatggcttctccaaaaggctttaaagagttgatatgttgccttaaatccatgagttatttccagaaagtaattctgatgctgagaataatatgactacatcacaagcaaaactaaatgacttaaggaaacaatacatgctaaataacaaaatgtatgttaactggttctttggtctttacatggctcataagttttaatatggatgaaagtgtggacattaaaacaaaattataagaaaacagaagagtatgttccccacattgtaaaagagaaaattctgaatactgaagcaataaaagatattggtgacaactctgatgtctgacaataaaatgtgttcaatgaaaataaaatggggaaataggataaataagaaagatacattttaatattcagatatatcatgaaacaatacaaatctataagagtaaaaatcagccttcactgaacaaaacattacagaatacaaataagtagaaagacttaaaaaacaaaccaacaaagaacaaacaagaaagacaacatgaacttggaaaaatattcagccctgcaatgaaatacaaatatcaaattattctttttgaaaaatgaagtcccctcagcaacaccttatatcaaagcttaatatccttctccaacactggcagaacactggcaatttactctgataaaatatagaaaatataaactactaaaggtgaggcgctgtactaaaaacagaagggctaaatgaaatcctacatattcaattattagagtactccgagctcaattccagttagcttacctacacattggcagctgggttggggggggtagaaaaatagaaaactaagcaatggaaaaataaataaaaagttaattatggttccttaggaaacatacataaagctgtataaaaatataatcaagtaagctacatgcattactatcatgggctataataatacatacacgtgatgatatccacgctgaatatcaatataactatactggcagaatagagagtgaagagagagaagaaagaagggcagaaaagcaggaagcaaaggaagaagagagagcgcatgagtgagcgtgtgtgtgtgtgtgtgacagagagagaagagtgtgtgtgagtgtgtgcgtgtctaaaggagctaaatcatcattatacttaacagaaagtcaacagacaacatctaaaattgaaaactccaaagaagcagaacccacgttatttttttaaatgtggttaaatatcagaagaaaccactacaagagataaaagtgcactccaaagtgagaattgggattgaggagtgggtcagaggaatgcttttctcaacagaactgactctttatattctataggtatactactttggtaaaaattcctaaaaatattgataatcataatgatgaatgtcttagccaactagaattagggcaaatttccttaatccaataaaaataactataaaatatataatataataaaaatataatatatatattatttaacagctctaattaattttttaatttaattaactgaattgaattgaattaaaattaacagctttattgagctataattcacatgcttacaatttacctttttaaagtgagttctgtgggttatttctatattatatattttatatattatatatttatatataatatagtatatattatatatttatatattttatataaatatattttatataatatatttatataaaatatatattcatatatgtattaatatattaatatataaatatattttatatataatgtaaatataaaaatatatatttatatataatatatttatatataatatatttatattatatttatatttataaatttatataaatttataaataattttataaaattataattttatttataaataaatttatataaatttatataaatttataaatataattatatataaatatattgcatgtttatgtattaataaatatattaatatataatatattatatactatataaaatatataaaaatatattatatactatataaaatatataaaaatatattatatactatataaaatatataaaaatatattatatactatataaaatatataaaaatatattatatactatataaaatatataaaaatatattatatactatataaaatatataaaaatatattatatactatataaaatatataaaaatatataaaacattatatattaatatattatatatagttatatactatatatagtatatatatttatataaaatatttatataaaatatataatatatatactatatattatatataaatatataatataaaaataacccacagaactcactttaaaaaggtaaattttaagcatgtgaattatacctcaatagagctgttaattaaaaaagaatttttaatcacagcaaacatctcaataaagggtgcaatactagtaattcctcctttaagcaacaaaaccaagatgtctttttcttttttttattttattttatttcttttttgagacagagtctcgctctgtcgcccaggctggactgcagtggcgcgatttcggctcactgcaagctccgcctcccaggtttgcgccattctcctgcctcagcctcctgagtagcggggactacaggcgcccgccaccacgcccggctaattttttgtatttttagtagagacggggtttcaccgtgttagccaggatggtctcaatctcctgacctcgtgatctgcccgcctcggcctcccaaagtgctgggattacaggcgtgagccactgcgcctggcccaggatgtctttttcattgcctgtgataaacaacgcactggaagtctgagacagcatagtaagaaataaaaacatgaagaaatagaaagaaatgagaaagaaagaaaccggtcattattcagacaatatggttatctacatggaaaatttaagataatctgtgggcaaacctgtaaaataattcaacaaggtggttaataagacaattataagataaatatataaaaatcaaacaccagttttatatagcaataacaattaaaaatgtaattttaaaaatatatcatttgtaatggaaacagaaactttaagctacccatgaataaatctaaccaaagccatctaatcttttaaaaataaaattataaaattttattgaaagataggaaaaaataatgaagaactatatcttgtcatgaatgggaaaacttcataatgtaaatgcatgaattctttccaaattaatctataaatacagtgcaattacaataaaaattctaacagaacttttcctagagattataagctaattctaaaattcaaatggcagagtaaaacaaaggacagctgatacaattccaaaggaaaataataaagtgagggatatgccctactatatataagcacttttcttaaatcattaattaacaaatgtgacaaattagagaaacagaatggtggaacacaatcaagtccagatataaattcacacatatatgaaaattagagggactgggtgtagtggttcactcttgtaatcccagtgcttcaggaggccgaggtgggaggatcgcctgaggccaggagttcaagaccagcctaggcaacatagtgagaccctgtctctacaaaacataaaaaaaattaagccaggcacgggtggctcatgcttgtaatcctagcactttgaaagaccgaggcgggtggatcacttgagctcaggagctggagaccagcctgggcaacatgacaaaagcccgtctctacaaaaaaatacaaaaaatgagccaggtgtggtggcatgcttgtggtcccaggtacttgggggcgctgaggcacaagaattgcctgaacctgggaggcggaggttgcagtgggctgagatcacaccactgcactccagcctggttaacagagtgagattctgtctcaaaataaataaaaaaataagtaattagccaggtgtggtaatgcatgcctgtagtcccagctactgagcaggctatggcaggaggatcccttaagaccagaaatccaaggttacagtgagctatgaatgcaccattgcacttcattccgggcaacacagcaagactctgtctcttaaaaacaaaaaaaaaaagttaaaaaatatttttttaattaaaaaaagaaaaataggtagcagaggtagcattacaaattagagggaaattaatatgcactatttaggaaacagtgctgggacaattctctatccatacaggaaaaaaattgattcataaattcacaacataaacaaaatgaatccaaggctttgtaaaagtatttataaatcccatcctttataaacaataaataccttaaaatttttaggagaaatataacataggataagaaaagactgcttaaagtaaattcaaaaaccacaattcataagggatgttcatatcagaactgtttattatactgggaaactggaaataacctatatttcaacttatcagattaatcaatttagaataagtacactcataaaaatgctacaccgcaattaaaaattatgtgaaggaatctttacttaaataggaaagtatacacaatatattgttaaattaaaagagggtaaaacaaatgtgtcatatcagaaatatatttataataagcaaatatgggcatagaagaaggcataagtagacataaatcacaatgttcacaatgttcatctttgagtttatgagtcatttttctttgtgccattctgtattttccagtttttttcccttgacatacattttatttgtacattttataactgacatgtaacatatacagtagaatgaactaatcttacatgtacacctcactaaatacacacacctccccatgtaactaacacctgaccaggatacaaaacattcctagaatcccagatgttcctttgtgccccttctcagcccaaactgcttcaaacccccacatagttgtaaccagtacttcaacttctgtcaccataattaggtttgtctgttcttcaacttcataaaaatagatttatacagtttatacccttttgaatctggtttccttcacctaacataatatttaagattcatctagagccaggtgcggtggctcacacctgtaatcctagcactttgggaggccatggtgggcggatcacctgaggtcaggagttcgaggccagcctgaccaacatggagaaactccgtctctactaaaaatacaaaaaattagccaggtgtggtggcgcatgcctgtaatcccagctacttgggagtctgaggcaggagaatcacttgaacccaggaggcagaggttgcggtgagctgagatcacgccattgcactccagtctgggcaacaagggcgaaactccatctcaaaaaaatatatatatatatctatatggttgtgttggaagcagttcattttttattgctatgtagtattccactatatgaatatgctacaatttatccttttctttttttttaaacagggtcttgctctgtgccccaggctggagtgtagtggtgcaatcatggttcactgtagcctcaacctcctgggttcaggtgatcctcctgcctcagcctcccaagtagctgggactacagcgcatgccaccacaccagctaattttttgtagacaacagggtctttgttgcccaggctggtcttgaactcctgggctcaagcaatccgccagcctcagcctgtcaaagtgtaggattactggcatgcaccaccaccctcagccccattttactgttatataagtagctttcaaaatgcaaacaatttatgcaaaaaatattatgaaagatgtcacaatatggaaaaattcttacaatagataccacgctgcattttataaatgcagggcaaaaatttaagtatatcctgattaaaatatatgttttaatagtcacatgccccgaatactattgtgatcatgttggcaattattttcatcattttttttgttcaaaaacctctttgagaaataacatcagcaagatggaagaatttgagttttctagccaggcacggtgactcacacctgtgagcccagcactttgggaggccaaggcaggtggatcacttgaggtcaggagtttgacaccagcctggccaacatggtgaaaccctgtctctaccaaaaatacaaatattagccgggcatggtggggcatgcctgtagtcccagcaactcaggaggcttagacatgaggatcacttgaacacgagaggcagaggttgcagtgagccgagatcacgccactgccctccagcctgggcaacagagtgagacttcatctcaaaaaaaaaaaaaaaaaaaaaagaatttgagttttccattgtcatctcccaacaatgaaccaattctgacaaccactcgcacatgagagtacctttgttaagagtctaagagtctagcagagaagttccaggaccccattggagcaaaaaatccaagaacagatgcattgaagagggcaaaaagtatagtttcatattacctacatcacccctgccccatggaagtacagcccagtgccaagagagcctccattagcccacaattcttcccatggggaaaagtgagaatatagtgagtgattaatgaaataaagaaaatgtggcacatatatatataatgaaatattcagtcttaaaaaagaagaaaattttgccatttgcaacaacatggatgaaactggaagtattatgctatctgaaataagcctgatagaaagacaaatactgcatgctatcactcatatgtgtcatctaaaaaagttgtactcgtagaagcagagtcctcagccccaaagttcactggtgaagatgtacaacaacaggaacttttgttcattgctggtgggaatgcaaaatggtacagccactttttgtcaagagacaaagtcttgctatgttgctcaggctggagagcagtggctattcacaagcatgcaatcatagtgcactacagcctcaaattcctgggttcaagcaatcttcctgcctcagcctcccaagtagctgggactacaggcgcataccaccatacccggcagttacagccacttttgaagactgtttagcagtttcttgcaaagctaaacacagtcttaccatataatacaacaattgtgttcctaagtaaatatccaaatgagtagaaagcttgtcactaatagaaatgtttataatagctttattcacaattgccaaaaactggaaaccatcaatgtttctttcagtaggtgaatggataaactgtggtacatccaaataatgaaatatcattcagctataagaagaaatgagctatcaaggcaaaaaaatacatggaggaatcttatatgcatattgctaagacagaagccagtctgaaaagactacatactgcacaatttcaactatatggcattccagaaaaggcaaaacaatggagttagtaaaaaaaatctgtggttgccaagggtttggtgggtgtgggcgtggtgtggtggagggatgaataggtgtaacacagaagatttttaggacagtgaacacactctgtatgatactgtagtggtggattcctaggcaaaacctaattgaactctacaacacaaggggtaaaccttaaggtaacctatggactttaatgaacaataatgtagcaataatggttcatcaattataacaaatatactacactattgtaagaggtcaataatggggaaactatggagttggtgtgtattgtgtatgtgtataggtgtgtagctgggagtgagagtatatgagaattctggaccttctgcttaatttttctctaaacctaaaacaaccattctaaaatacataatctattaatttaaataagtaaatagcaacaaaaaaagaaaatatattcttatcggcaaaaaacattagaaaatataatgaaatttatgcagcctctatttagaaaaatgtacaaaaggatacgctcataaaattttgcatatagcttcataagtttcatagtcttccaaagcctactcatgatctctccatgaatatcaggtttataatttctaaattaagatgaacaaaataggaatttctcctctttttattttctaaaattttaacttttacaattgactaagtaagtctacaacctaaaaatattgactccttttagctttaaacaaagcaattaatccctttaaagactaatttccttcaaactaaataatgctatattttcacccacaatttacccatgccatcacttaaagattatcaaatttagataataaaatttttaaaaaattaaattgctatatttaacaattctgggttactcactagatttaatctggatttagtcacgactaaatcacttctaattcactaaatacgtttcacaggtagaaaaaatatcttacctgcaaaatgggaaaagtagcagtggtgatacccattttgtgtaaagttaagagcatttcatttccactccatattttacaagctgattcataatctctttctacaagatattcagcgtttgcttctaaccaactgaaataaaataaaacaattgtgtcaaccagtatcatccttacacacactatttcagcagaacaagagaatcatcattattgtcatgcgttgatctgtatatcttgacattcttaggacatgaatgtggattaattaagacaccttttaaaaagcattcatgtctcatattgcaaaataaactttatataactgaaaagaaagcttttattcagaagaaacaaacatgcatatgatttcccacttgttttgtggattcacattgctttacttagctaatgtctcttcaactgagagccaggtcttaggtacttatcccaaatatatataaaaggaaatgcaaaacaacctaataaagaaattaaagtgttacatattaacacaaaaaagagaattactagaaaatatataaatacattcattgatatatatacacattcatacattaagtgtttgaatgcctattttattccagacattgttctgggtagtgaaaataacagcagttaaataaaataggcaaggtccttactctcatggaaattacattctactaaagggagacaggaataaacatcaaaacaaatacataaacaagaaaatgtcaggtagtcatgggatactatatggccataaaaaagaacaagaacatgtcctttacgggaacatagatggagctggagatcatatccttagcaaactaatgcaggaacagaaaatactgcatgttctcacttataagtgagagctaaatgatgagaccacatggacaagaggggaacagcacatactggggcctatcggatggtgtagcgttggagacgggaaaagatcaggaaaaataactaatgagttataaggcttaatacctgggtgatgaaataatatgtacaacaaacccccataacatgtttacctgtataacaaacctgcacatgtacccctgaacttaaaagttaaaaaaaaaagttctaataaaatgaaaaaaaaatcaggtaattatatacaaataaattatgaaaataaattagtttaatataacctagttgcaactttaattttaatgtcaagaatgctctccctgaggtgacatttattctaataactgaatgcaaaaagtatccagtcatgggagaatcagaagaaaagaaatatccaagcagaaggaacagctaggagaaaggtcctgaggtggttagcaaattttgcttgtttgaggatctgaaagaaagccaatatgatttgcagcacaatgggcaaaaatgaataatggtatgaacaatgtcagagtgataagcagaaatcagtcatcttgagtcatcataagaaatctgaatttattcaaagggcaatgggaaggcttgggttttaatttttaattttcgtgggtacatagtaggtgtatatatttatggggtacatgttttgatacaggcatgcaatatgtaataatcacatcatggaagatggggtatccatcctctcaagcattaatcctttgtgttacaaataatccaattatattcttttagttatttttaaatgtacagttaaatcattattgactatagtcacactgttgtgctatcaaatactaggccttattcattcattctatttttcttttttttgtactcattaaccaacccctcctcccctgtgatccccatctactacccttgccagcctctggtaaaccatccttctactctctatctcaatggattaaattgttttcatttttagatcccacaaataagtgagaatatgtgatatttgtctttttgtgcctggcttatttcacttaacatagtgacttccaattttatccattttgttgcaaatgacaggatctccttctgtgttatggctgaatggtactccattgtgtatatgtaaccacattttctttatccattcatctgttgatggacatttaggctgctttcaaatcttgactattgtgaatagtgctgcagcaaacatgggagtatagctatacctttgatatactgatttcctttattttgggtatatatctagcagtgggattgctggatcgtttggtagctctattttaagttttttgaggaacttccaaattgttcttcatagtggttgtcctaatttacattcccaccaacagtatacgagggttgtcttttctccacatccttgccagcatttgttattgcctgtcttttgcataaaagtcattttaactggggtgaggtgatatctcattgtagttttgatcagcagagaaatgctgatcaatgatgttgagcacttttcatatgtctgattgccatttgtatgtcttctttagagaaatgtctattcaaatcttttgtccatttttaattagattattagattttttcctacagagttgtttgagctccttatatattctggttattaatcccttgtcagatgggtagtttgcaaatattttctcccattctgtgggttgcctcttcactttgttgattgtttcctttgctgtgcagcagctttttaacttgatgtgatcccatctgtccatttttgctttggttacctgtgcttgtggggtattgctcaagaagttgttccccagaccgatgtcctggagagtttttccaatgttttctggtagtagtttcatagtttgaggttgtagatttaagtctttaatctattttgatttgatttttgttaatggtgaaagataggggtcttgttttattctcctgtagatggatatccagttttcccggcaccatttattgaagagactgtctttccctcagtgcatgttcgtggcacctgtgtcaaaaatgagttcactgtaggtgtgtggatttgtttctgagttctctattctgttccattgatctgtgtgtctgtttttatgccagtactgtgctgttttggtgggaaggttttaaatacagagttttaaataaaagacagactatctattttacatgtttaaaaaatgattctagctaccaagctagaattgattactggagaaagatgagtgaaagtagagacctgttaggaggttgttataatatccttgttgagagaagactgtaggatgatagatatgaacaatcaatgatattgaggaattggggatatactgtgcaggtggcatctataagacttactcattaattggatgaggtgaggcagtaaggatattattaaggatagtatttaacttttttacttgaggaactggtacatactgtttgcttagatgaggaagactggggagaaaacagaacacaggaagaaaagcaattctgttttagatgtaaagttgaaatgtctattttgatatacaaaaagagctataaagtagatagttggatataagaatggcattctagggagaggctgaagctagagacataggttcaggcctcaccagtactgaagattatattctaagctatgatactacaaactatttagggaaaatagaactacagaagaaactaggtcccagtaccaagtaagtcctgaggcaccccaacatttagatatcaaaaagaataagaattatcaaaagaaatgataaaaaaaaatggactgtgagaaggaggaaaatcagagatgtcacagaagctaagacaaaaatgcttttcaaagaggtagtcatcaactacccaacaccactgactggctgagataaaagaaacaataacctctgtatttggcaatatagagatcactagtgatcttgatcaaaacaatttgcgtagaattgtccagagagcaacactgctaagatcgatgagggaagaatgtcaagtgagaaaatagaattagcaactacagacaactctttcaacaagttatgctgtaaaataaaaaccacaaaaatctgcatggcaaaacaccaccagaaaagacacaaatggcaaaatggggtggaaagtatttacaactcttattgcaggcaaagattttaattccctaatatatgaatggggttctataaatcattaagaaaaagaaccacaataagaacaaaaaaaggacagagatgtcaacaggcagttgacacaaaaggaaatataaatggcctttaaagatgcttaatttcatgcatattaaggaaaatgaatattaaaactacattgggataccacttttcacctagcaggctagaagaaaacaatttccatactcttatacattgctggtagaagcatacattagcccccctgtcatccacctattgtgtaaatgttagctatatctattgaaattacaaatatgtctatgctttcacccaacaattccacttctaaaaagattcctatagatatatttgcatacaaatgaaattatgtatgttcaaagttattcattatagcagtttaagagcaaaaaactagaaacaacctcctctattaatcagaggctggttaaataaactattgcatatctatctaatggaattctagatatctattttttttttaaactgagaaagctttctaggtcttaacatggaaaggtctccaaaatacactgggaattgaaaaaagcaagttgcagaaaaatgtatgtatactatgccatcatttggaaaatagtgagggacaagaaaatatatctaatattggttcataaatgagtaatatgcattgaatgataaacttgtttaggagaacacagacattaaacagatcagggatggaactggaaggaggtttttactatacaaatttgtatacattttgtcttcaaaccatgtgactgtgtaacattcaaatttttttaaagtgtaaatgtgaaggaaacagaaaaatgctacaataaatgaaatgggattcagagttgggaagtttttttctatggtaacaagattctagatcaacaacttaatgtctaataaaagaaaaattagtgtaaattgtcataaagctagtactaaatatattattttagagtactgaaatcttgattaattaaaacccatgaaactagaatcctatttaaattggagaataaagcaataaattaaagccatgatccagaattttaaaatatattaattaaaagcacgtttagtttctggttcaatatcctagacacatccttcggggctattatgttatcctgccaaattaggaataagattcacaattattcatttttaaaaatcacttatgttcattatattcttgtgaacaagacaaaaggttggactagccttgtttttaaagcttaactggcaaggaacaattcatttcccaagaagcctagttaaccaaagtttactaactttaaatactctggcataatcaaacatatttttcatataaaggcagcacaaatacactaatagacaaatcttcttacttaatgaggctacagcacacagctcgtaggggttcatgatctttcttccttatattattgttgaccatactatctagttcatcccgagcaaaccgaagctgaacttctgttacactgtaacttgctgattcccgagcacagtcctcgatgttatgagcttcatctaaaatgacaacctgttctttcagatttaaatccatctataagataaaagaattttcttgtaaaacatttggcaaaatagatttaacaacagcaggcaagatatttcattttaaaattcacactataggccaatattgcaaatgcaattacataagcaacagagattctaggtcttaaataaaacttctgaagcactatggccaaccaaatatcagctctacattattgtgtttgccatttttttactcttaaaatactttgcaaacctatcgacagcaacaaaaatatgtcagtgagtctggatcaaggtaccacaggctacacagaaaggtataaaatcccactatgaaagtgtttccaacataattttacaaactaattataagacctttaaaaataaaataacaatataagattaaaagcataagacctttaaaagtaaaataacaatacaagattaaaagcataaaacctttaaaagtaaaataacaatacaagattaaaatgactcttaaaatactaacataatatatatgttttgttttaatctgtcctgcaatccttctccaacatgggagttggagaattgttcttctccaactcccatgtgatgctggcaggactattaacctgtgaatcaaaggacatcaccactttcacaatgggggtaaggcccaggattgtcagttaaatagagtattccatccttctgtggtcacagtgactggttcaggttcaggaacagacatgtgatccacggtaggccaaccagagtaatttggagggactaatatgtggccatgctcttttctccaggtgagctagctgcttatggttatctttgttccataagcaagagtgagaacttgcctgagaataaagccatcacaataaagagaatcaagtattttttcttaagcattttttagggtaggtttgtgtcacttgcaatagaaagagtactgactaatacaaggaactgtcacaaagcaattgtcaatgagttattttgaggaagtaagaatacacagacagctgaaaagttgagaaaaaaccatggaagagtaggaaatatattggggtttaaaagataagtaggatttggatttggacagacaaagagtggacagggcattccaaagaggtgtcatcaaaagcaaagatagagtaaagaacaaggtatcctcaagggagtatgaggtaatttttgaaggattcaaattgggcagatccaggtcagactattgagcatcttgagtgtaagcttaagaaatatgaactttatctcatgagcaaaggaagcaatagatttttaggcagataaaaggatgtaataaaagcaatatttggaaaactgacctggcattgatatgcacagtgtctcagaaggaagagatctagttaagagataaccaaataagaggtaggatagaaggggtagtaaacataatgcctattaatttggatcttaaagaaatagaaagctgagatgaattgtgcagtcagatctgaagacaggaataacaattgactatgccaaattattcactttttgtcttatgctgttaacaattgcatgtctctaaaaagaaccaggcaaacaaacacaaatgccattatctgaagttcacttctcaaagctcacaaggcataattttattcccccacataagttcttcaaaacatagttttttcagagaaatgtttctaaataattctttttgaatattcataaatgcaaagagaaatcctgctgtaatcccacttcagtcactatgttccttaaaactgcttgttattttggaaattaaaatgagtgggttgattttaacccatgttaggatatgttttcagtactctaatatgtttacacaaatttatttacataaattaaagcaaaaaaaattaaaacatctaaaagcttttacattcaacatttacatctccatgagtaggaagaaggttctcatttttacacatatactcacactttcccttatttgtgcatctagaagatagttgtagggacaaaatatgatgtcagcatcttgtattagttctcgggctgtgtaatatggacaggcctttagtttcttccccaggctgacaagttcttctatatcccaggctttgcacatcccttggaaagtctgtaatgtgtgctgatcactaattttatgaactccatgataaaaatagcaggattttccctagaaacaaatatgcataactgaaatgtgaaccaatattagcatagaaggaataaaataagcttatctcagaatttgaggaacatcattaaagccacaaggctaagattttactggctacgccaccacacctggctaattttttgtcttttttgagacaataccatagctacaatcacaacgaagtctggttgactcagacttagatagaagtccaaatcggaagagctccaaataccctaaattaacttgaaaaaaatttcttttaaatatgtttgttatgcctttttttttctgattaaactgatgttaggcatgaaatacttctgaaaggattcacaaaacaatggtatcactggttgcttccaaggatgagaattaagtgactgggcacaggagtgagagatttttctctgtagacccttttgtaccttttcaactttgagccatgtgatagtatttcttattcaaatataaataagaaggaaggaaggtaagtaggtaggttggaatgtcctaaggggaaaaaaagaaagtaagagtattcactacaaaatattcaggagtaccaaaaaaagcctaaattatccataattctattacacaaagaatgcactagaaacattttggtgtatttcatttcatatttcttctatacatgtgtatataaggatatctctacaatgtgacccaatattaaaataacaagaacaagcaaggcacgatgacaggtgtgagcactttgggaggcttaggcaaaaggactgttttaggtgaggagtttgataccagcctgggcaatgtagcaaaaccctgtctctacaaaaaataaaaaattttctaggattggtggcgtacatcaatggtcctagctactcaggaagctgaggcaggaggatcacttcagcccaggagttcgaggatgcagtgagccatgatcaagccactgcactccggcctggatgacaaaacaaagccctatctctaaatagtaataaaaacaagaacaaagcaaatgttccccaggcattgaggattattaacaattcagccacaataaacaaaaatttttataaagcatattccctttgttttcttctgtctagcgtattaaaaatcatacaaggaaaatcttgacatcactaagcatcttttcgttgctgctcatatatgtacattgaattaatgtgccatagctgatgaaccagttttcttattactgggcttatagactgttaccaatttctgctttagacataaggctgcagtgagcattcttatgctggtttctaaatattttcttagtctatatttttagaaatggcattatgggatcagacgctacaaggtatttttaagtttcttgaaaacatatagtgaaattatcctccagaaagtatatattgctttgcattacccttttcccacatccttatcaacactggtgttatcttttgttatctctatcttaaaagtaaaaaatagaatcttgttttgatttgtattttttatagtttctagcaaagtttaacatagtgttgtatgaatagtctaacaaggttcaatagtaatttgtgtttcttcttttatgttatctactaatgccctttgccattctattacctttttttttttcagagatgggagtctcactctgtcacctggggtgcagtggcacgatccaatcttggttcactgcaacctccgcctcccaggttcaagcaattcttgtgcctcagccaccaagtagctggaaccacaagtgcatcaccacatatggctccttttttgtagagacagggttttgtcatgttgctcaggctggtcttgaactcctgaactcaagcgatccgcctgcctcggcctcccaaagtgctggggattacaggcatgagccactgcactccaccccattctatcactggaaataaaaaaatttcattacaggctgggcacagtggctcatgcctataatcccaacattttgagaggccaaggccggaggactgcatgagcctaggagttcaagaccagctgggcagcacagggagactcaatctctacaaaaaaacaaaaaaaattaaaccgcagtgagcagtgaccacgccactgcactccagcctgggcaacagagtgagatcctgtctcaaaaaaaaatactcattatgtgcattaataaaaaaataaaatgtttgataaaacccagccctaacaagtgtctcatatactattaaaaatgtacaaaattagaaaagtatatatatttttagtagaagtataaaattctagtagtagaagtacataggcaatttgtcaaaaaactaccaaaatttaaaattttaccattaatgtgaatagatgtaccctgtactgttaaatagccaaaaaattgaaaattaaccaaatgtctacccataagggacatgttaaataaattatggtaaattaatacaaaaactttagcccttaaaaatgatttagatttgtctatgtgttgattaggctctctatgttaagtgagaaaaacatgttgaataacgtgtatagaatgattaaattcatgtaaattgcttttttaaagaatatgtgcacatacattatagcaaatacattttttaaacattctggtagaatagatatataaaatcttacagtagttaccttaaaggattaaggagatggaggatctagaaaaagcctctcttttcattttctaaccacatacatgtactacttctctttttcaattgtcattggaactaagtggtagaataatgggccacttttattttaattaattctactatttattttaaaacgattttgaaataaaaatatttatttttcctagtttgctatccttaacaaaaaacaaccatacataaaatatataaattatatcagggataaaagactttgaggcagctatatacatatgtgtgtgtgtgtgtgtgtgtgtgtgtgtgtgtgtgtatgtgtgtgtacatacacatacatatatacatatgggttcaagcacttctcatgcctcagcctcccaagtagctgggattacaagcacgcatcaccatgcccagctaattttttgtatttttagtagagacaggttttgccatgttggccaggccagtcttgaactcctgacctcaagtgcccacctcagcctcccagagtgctggcattacaggcatgagcatcatgcccggccaatgtattttttacaaatacataataatttccccatatatatatattcaaaatatttttgtctaataattattaaaattataaaatataaaaataattagtctaacaaggttcagcaataatttgaatttcttcttttaggttatctactaatgtcctttgccattgtattactggaaataaaagatttcattacaggctgagcgcactggctcatgcttataatcctaacactttgagaagccaaggcaggatgaaatgtctctctctttctgtgtgtgtgtgtgtgtgtgtgtgtgtgtgtgtgtgtgtgtgtgtgtaaaattaaattgtatttgtatacgtctgtataataaattaaattgtatatatatacacacacatatatatgcatatatataatctttacatgtatttttatctatgaattatccaaaaggagaatccgtgttttcaaaacatacatacatcaatacatacacaaatgtatctagatattgctagaaacaaagtaaaccataagagattcataacctataaaagaatgtcagcaaatcaaaggacaagacatgaatagctgaggaccagttctcctaaagctttgtattcagccatgttaaaggatgatacctgttagtcctccaaagtattaaaaataaaaattaggaggaaaggactcatctaactatatttatttaggccattttctacattattttcactcactttctctaacctctactgttcttattcttcatactgtgtcaacttctccctacctcaatgccatctttggattttgtttctagtgtaaccaaaatagcaatggatgaggaatcagaaaatttgggttctggtccctccttgctaattacttgtctgactgagaaaactccagggcccatttttctcatgtgactaagcatcaaaagaatatttgaaccagaaggcttgtaagattccttctgactcactgactatatcatctctaaaattccttccagctctaaaattctgtgattcaggtaaaaacgtgtcaatcatctttcatactctcagtttgatacagactgagtttaataataggacattcaccatttcttcattccaagcttcttccatacaattctgaaagcttacctttatacaaaatgatcactaaagtgcctttagaatctatgactatgagctattaagtctcattttaaccaaaaaaagatatatatctaaaataatatttcagaattgtcattcctgactctagttaaaattattttttcttaactgaaacaaaaattaacttttaacagataagtgcatacttttccagtataagggcactttagtaaaagaaacaatgaacaaaaacacatgtgccttggatcaagccaaaaaatcagaaagtttacactttaagggcagttagaatgacacccctctgcaggctgacagcaaaaccagaaaagctcatccattttagcagtgtaacacaaccctgaggaagtctgtcaattgaagtgttatcacactttaaacacttccattcaaactgtcagttatctatttatcatttcgctttggtaattcagtcaaagtaaacacagacacctatggtgactttgtaattgcccttcattacaataccaaattactaacagggcttgagaacaagaaagaggatgttcatgtatgcccgtgaggtaagcattctgaggcagaattaggtcaagacaaaccacaagcagatatcttcaattattcatattactaatattaaaaaataaaatacctgttcactttaagacaaactaaaggccaatgaaaaattcggaacattgaagtctactgaattcctttttatttttacatgattcaaacttatgagtaaagatcaataaaaacgtaaccagcactgtaggattctaggttacacaaaatgaaactgtctgccttcaatacacaatcttacactttatcattgcttttaccaatgtattttaccaatgtatgtttttggttggttggttgtttttgagacaagagccttgctctgttgcccaggctgcagtgcagtggcgcgatcttggctcactgcaacctctgcctcctgggttcaagcgattctcatgcctcagcctcccaagtagctgggattacaagcatgcgccaccacgcccagctaattttttgtatttttagtagagatgtgttttgccatgttggccaggccagtctcgaactcctgacctcaagtgcccgcctctgcctcccaaagtgctgggattacaggcatgaaccatcaggcccagccaatgtattttttacaaatacataattaatttccccaataacaagtaaaacaaaaaaagataaaaatatggtgacaatgccagcaagtcttcttgcataggctatatagccaaaaaataaatttcaagcatttgaggaattcagcagatcacttagtcactatggaaagcagtctacttatgcatgaaattcatggagttttaccataaagagctttattttattatttttgaacacctgacacttaatactttcatctctccttgaagagaagttttttaatatacagagtaaaggaatttcacaattcctcagttagttagaaataactctttggaaataaatatgactgtaggatttcaacaatgactttgattcagtaattctgtattctctcctggctcggaacaagtcactcaagttttgccattggaacaccttactacttatactttataatctcgtttgaatatctgttaaagtatcttttgaccatccctaaataaagtttaaataaattttcatctataaaagagagtattaaggaagaaaagcataaaacaaaataattcacattatatggtagggggtgatatatcaatgaaatgaaactctgggggctatagctcacagttttttgtgtagaaccaactctaataagatactagtgaaaaacaaaacaactctaaaaatatattaaaatatcattggtcacttcatagtaatcaatttatggttcactgatttgggggtataatttcatacttgcaacttcaattttagagtaaactaattatcacaccagaacataggctcccaaactaatactgccaaaagaaattatttgaaagtcatataagtctttagtaagaaagaattctctatttccaccaagcccaaattcatattattctaatttccctggaaaatttcaaaaccaccaatgacatcttttgaaagttaataatttagtataacttttaaaagaggggtttgtatttatcagaattatgaggtgggataatcattatatttctcattcaattaagaaaattcaaactttgcccagacagcctaaataaactatctgcttttgaagtttttaagtatataaagtatattaattagatctaattagactaaaccatttaaacacttctatctcctcatatgatatcatccaagtttgactatttttggtagcaggatttaaaagaagaaactaagatgtctgactacaacagaaattaatttcaaggaattaaatatcccaagctttaagaccaaatcccatactttaaaacttgactaaagattttattacaggaaaattgttttttaaaagatatcaatactagcagttaatttgattttccgaagttgattatcactaaaatgtacatataaaacacatactgagtaatttaaatattttcagccttattttttctctaacacaaaataactttactcacgtttttcccatctagcaattccatgcacttctcatttctgttgaagttaccgactacctcaggatggacacaagtatgatccctgctggaaagaatagtcattggaacccctgaatatgccgtcctccggagctctctagtaatctgagcaatctgcttgtgtgtgcgtgtcccaaaatatattttgggtatcttggatttccctgtatgatccttcttaatggtattcgatgactcttgactgtttccttgtttagtagaacaacagcacctagaacagtggccagggggctgtaagaaaggaaagaaacgataactaatatctaaactaccataaaaaacgttatcaaacctcacatggaatcagaacctgtaagtaatgaatcacaatggtcaaataaagagaaataacaagaaattatagtatctaaaacttgccattaaagaaaaaactacaatttaaaattggtcctcattctttcttttaaaagttataaatgatatttccaaatttgcattctttccaacataccactctaactctccaattccaaatgttttgagtacattttaactctcctctttcataaattataaaaatgataaaacaaagtaggaacaattttaattttttcttaggcttcatacgaacttgtgatattatagtttagagttaatagttttgttcacagcatagttcattcaaatattccttaatacaccaatgcttttgaagcacttttaaatatagtttacaaaagaatagaattatcaagttgaatctaaaggatcacttaacaacttcaaaaagagaaaattcttctttagcaaaggtacgaaaataaatgcaaaatattaatatttaataatgaaagcaggttgcttgtgtggaacaagtatatctgaaattcagttacctgtcatggagtgtaaaccaatcagtaaaattatcatccagggtagtttttcctggacaatttcacttgtaactcagtttcataactgaaatagttatataaatgtctctttaaacaaaccatatggaacatcaggaatatagtctacttaatttacctgatttttctcttctgtttccaaattctcaaatactaaaaaaaaaagtttaatgctatatattagaactcacaggttcttaataactacttccttctaagtctcaattattacaccaaatgacacagaacaaagtctcattttagagaaatagtgtaaaatggttaatttatagaagtggtcattgatggggagggaaaaaaggtaaatagcattgtaacttaaaagactgtgtgctaaagagttttaatttagtagaacaaacactctacttgactgtttttttttattattgtaatcagtaagattagccttcataaacaaatgctaagtcatagcatgttacaccacaatactggggatgaagctgtcttttagcctcaactcagtggaaaagcaagttcaaattactcccagtctcactcaaccttgtccgccattaaatattacaatacatgatagaatggatgtaaatgtgacccttctggagctgtcactcactgggataaaaggttcactgatgtgccaaataaacagtcagtcaaagcagataaagttacagccatgctggaattgttacattctcctctcaggttgccagtaacagcagatttcattacagagtgctgccacattaaatagccagttccaaatatcctgccttctatattgaataattacttattcactaaaaggataaaaagaagagttatgaatggggctcttgtcaacagtgaggcaggaaacagctgacatgtggtttatgttacatatgttgcaatatccaacaatttacggtcacagagaaaatggaatgcaaattatatcatgatatttctgactgaattctttttggcttttgcaatgatcacattaatcaattaacatacaaaaagaattaaggtaactcaattagaattaatttactttttcataccatcaattttttccctcaattatactatttctcttccttatgatacagttaaattcatgtgaatactagaatgctatggcccaatgcactgttatgtactatatagatacattctatctaagcataaaagtaatccaataaagtagctttttctcaaggctgggaaaacttactttttgatgttacacttttcaacatcaattccacttaaagctttaccatctactccctttaatttcaccttttctcttggtcaaaaaaattcaaacaataatacagaaatattttttaaaaatcaactatcccatcacgaataatttagtgtataacttactgaccttcatatatacatatctttcatatctttttttcaaatagaaagggatgctattatacagttttacaactagatactttgttttcaaagtttttaatttttaaaaggggtgaatttggcacaaataatttaatgttctacttatctttaaatgttacactagtagtggtactaacaaaagcaaaagatcaagaactagtctcagaaaacttttctcactagagtgactttagttaggacttgaaatctgttttttcactccataattcagaatattataaaccacagctaactttatattaaatgtttttgtttgtttttttaagttgtaaagtaatatgaacaaattataacatctatgaacttaagtagactcctcaagaagatggttttctttttttgtttttctttttgttttgctttttttgagacagactttcactctttttgcccaggctggagtgcaatggcatgatctcggcttaccacaactccatctcccaggttccagcaagtctcctgcctcagcctcccaagtagctgcgattacaggcgtccaccaccacgcctggctaatgttgtgtttttattagagatggggtttctccatgttggtcaagctggtctcgaactcccgaaatcaggtgatccgcctgcatcggcctcccgaagtgctgggattacaggtgtaagccaccatgcccggccaagaagatggttttcaataggtacttaggcaagtaaggtataaggtggaaattaaaagttaattcttttccctttgcattattaaacaggaattatttcttcagaagcaatcttctattaaagtttccatttaaaagattcggtacaggccgggcatggtggctcacatctgtaatcccagcactctgggaggccgaggcacgtggattgctttgggtcaggagttcaagactagcctggccaacatggtgaaaccctgtctctactgaaaaaacaaaaattagccaggcatggtggcatgtgcctctagtcccagatactcgggaggctgaggcaggtgaatcacttgaaccagggagacggaggttacagtgagccaagaccacgccactgcactccagcctgggtgacagagcaagattccatctcaaaaaataaataaataataaaagatttggtacaatcatatttgaagacagaaaaactgattgtagtaatataacaaaggcttcaaaaagtcacttataacaaaagataattacctgtaccaaaatcagcaactttcaatgctctaagaaaactagaggaaggatcctgatgccagcagtgtcaggaggtcagaatatcccccaatcaaattaccaggctaatactttatggcctctctctgaaaccctttgacccaggggtcttaaaacaattagatgaataaaattaaataattttgtatctcttattgagtatttttcctgctaacaaatgatcatgtttatctttcaaaaagacttttttattttccctttgctgtttaaattgacagagatttccttttctccaggaaactagagaataaattttataatattcactctcatccaataatatatctgaaaatcaatacataagacatggggctttccaaaatctgtaaactctaagacctgtaagtggctacacagtgccagaaccaaactctttaagaaatggcttcttctccaagctagaaactgttcagagtccttttacttcaagaaaaggcaagaaaacccaacccaagtaactgcaaaaatatactatcattaaaaaaaaaaaacaggagatacatgtggatgtgacagctataatatttccatgtgcagtagccaattgtttaaaaatacatttcaaatctacaattatcaaaactgttcttagaacatcagcaaccaaggattttcagaaaatttttcttgtgtttaataaattatattccctctcttgttgtattatatagagacatgtctacattctttcaaagatgaagagttcgaagatttgatcttgaaagaaagatgaattgctgagtccttgccactgttcctttcacaagctataattataagttcaaacggtaacataccacaatgtcaacttctaaagatttataactttctccaaactttccctaccactcacacaaaaaaatactatgcctaaatacctgaaaaatgagcatagcaattaaatatttttagaaatggaaaatgataaagaaataggaactaatttcattgccaaagaagaagttcctttgctaactgtaaatcaggagagattctcaaaggagactacaaattgaatttcaaaagcaggcaggagtacgaaaactaagtatataaagaagtagagagaaaaagagaatgaagagaaacctgtttgagtgaaataaaaggaaaactaggtcaatgaaacagtaaaaaaaaaaaatacaaaaacttgtgttcttccataactttccacatgtgcatgtattgtctttccaaccacactgcaaattccttgaagacagaaactatgtcttacatttctttatatagctcattcatcgagagtggtgttttgcacataactgtaacttagctttttttaaactgatgaattatgactaaatgtccctgaaccaaatactgtacccatgcattacaattaaatctgacagatgcttaaatgatgtcctaatttgaagtgctgcacatatcaaaaagatacttcaaaatccagattagcttttaaaggaaaaagtacaggacaattactatttttcaaggccaaaaagaaaaaccatcttatgctagtattttagtcgtgacaaacatatatcccaatattttcattagtaataatactgccatttttaagcctgtccttgtgctaaacatttttcatctaatatcccatttcattcattcattgactcaagagacattggaatccctatatatcaagccacggagaagacaatgacaaggatcacctcatcttactgacaaagagagcttcattcttaaattgttctacaaagtgtagttcttggagtttatcacaccattttcactcataaaccaaggaattgtttaaagttagttatattattttatgaatgcaattacaaaatattcctaagtatgatcttcataaaaattgttttaacttattagttgacatttaaatcaaatatgttataacaagatccatattatgtcccccaagggaaaaataaaaaacacaaactttcaattaatagactctttagagcaagagtcagcaaaagagccagacagtaaacatttcaagcttcaaaggctatatggtctcttcttccataggaagatatcttttatgatcgaaatgtagagaaggatttcctaaaacaataaaccaaaaacacaaatgagtgaaaacacagcttcattaacatgttaaacttctatttaaagatacatattccttaaagaaggaaagaaaaataggtaaaaagggggcacaggctgacagaagatacttgcagtgcttacagtcaagtgaggatcagtatctacaacatataaagaattccaataaatctatttttaaaagacaaaccctacagaaaaccaagaacaggcaaatcacagaagagaaaagctgaaaggctaataaatatctgaaaagatgtgccatctaatgtacagcttcactagtaattaggaaaatgcaaattaaaaccataattagattccatttcctatccaccagattgggtactggagaggatatgaagaaactcttattcactgctgatcgaagtataaattggcacaactacttgagagcaaattggtgatctagtgaaatcaaagatacatataccctttgacccagcatgacactgttaggtatacatgctagaaaaactcttgcacattaagacagatacaagaggaatattaattgcagcattgttttaatagtgagaaaaacaagctacatgtatcaacagaaggaatggatgagtaaattgtgggctctttccaatcaatggaataatattataatgaaaatatatgaatgacagttgtatgcatcgacatcgataaacatgaacaagcagttgaacaggctgagtatggcttaaacaaaattgtattttccccataaaattctaaataagttgatgatagaaataaaaatataaaacttcaggtagagagtgaggaatcaagactatggaagataatcttaaaagctaacaattgtcatgaaaaacatacctgaaaaatgctagaagtgctggaaaaaaaaaaaaaaacccacagtaaatatactctgttctggtttctcctcagttgtttcatacccagcagaatagctttcatcttaacacctcctcctcaaaagttttcaacctaatttattaggaaatgggttctcaaattagggtccatgggctattacagatcacccagaaactacagacacaattttgtgtgcatttttagaaagtgaacccctaactttaatcaagtgctcaaagcagattgtgactgatttgggttagggctttattccagaatttatatctggttttttaacgaaaatcaaatggaaacaacattttctttataaccaaattagccagacatagttattctgtaaaggaataaacaacagccaagagaatttcataaagtttcctccactgcttctgaactcatttctattttaatgtttgttaattacctaatattaacataaggctaaaatactcagttcactaatgtatatttctaacttcattttacagataaaaaaggaaattcagaagaattcaaattcccacaaaatacacaataaatttgtggagaagttgaaattcataaccttaaatctttaaagtgaagctttaacaggattgttttcatctaccacttaagcaaaaaagcaaaacactgccctttatttcaaaaagtcatgcatatgaagagctagtggtaaaaggccaatgaacatagaattatactacaaactttgagacataaaaaagggttttttaatctttatcaaccatttgctgttgtccaagccatctaaacaggtactgaatgcccgttgtgcaaaatctcacattagcacacactctagtaagatagcaaaagtaacataactataccttttcaactattctttttttaaaaattcaaacagtagtagtaccctactgccaccgtttcatgattagactgcacaaagcagctgtttatccactcacagcaaccagcaggtgaacctgattcaatatttatcacaggctttcatagatcactgctaaccaagcaaacgttttaattaagctggaacttgcttcaaagagctcattcaagatgtcaatcagcaggtaggggatcagatacagtgtcaggtgagagtgtgtaatacaaatccacaactttcttcatcccatcgctgtaaattagcctgctctaaagttcagactctgattgtaacagactgccagtctcctggaatgtgtaactgaagtcactcaaattctattgtgaaggttgtaagcaatatgttaaactgcagtgggctagcacattaagacagatccttttcacggttgttttttgataccataagtgtttgttaccctactctccacttactgtttactttcttgcctagtgtaaatgggaattccttaacacagttgctccagtttctgaaaagtctgtgtttcaatagagtaaatcaataagaattatcagtttaagaacaagcatatcataaagatgactgacctgctataaagcaaaaattatcctggtataatagaactttacatagatgtgattatagcaatgagtctcaaagcagtgatgagtcacaccgatcaacttcatgagaaaaacccagggtgtttataaaaaataaaaaggggaaaaagaagactcaaacgagcaaaatggggaagtgggcgggtaggcggaaaatatcttctttaaataagaatgccagctaagaattgtaaataaaatgatagaattttaaaaatcaccattttgcaactttcctgtactaactgattcaggcaagttacataaatggatgctgaaatctttcagtgaaaagttattagggaacagaatattgacaaagtctcaaaatatcaccccacagattattcattaattacaaaaggaaaatgtacctttacaatgaagagacctggcagtgacactctaaccaagtggtgaaattcagcatcaatggtattgagactaactggcttcatatgcctcctgatataagaaatatactcttgtgcccatcttcaataaaactacatgattattaaatccaaacaatcaagacatgaatcaaaaagaacctgggaatagagaaactgtggtaaaaagacatatatgtattatttagtcggtgaaaattcatccaattgtaatttatgatatgtacacttggttatagattgtatttcaaaaaggcttttaaaaaaaaccctatctcttgagattgcaggtaatttttactttctcctttatggtatttttcaaactttcttcaatgaaccttttaaaatgagaaaacaatgctatcctatcatgtcattttccacatattaaccaaaatgctataaacaaaacatatgacatagagatttgtgcttctatgggctttaaaaattaaatggttattattacatacaagtctctaaagcagcactacccaacaggattttctgtgatgacagcgtatttgatatctgcactattcaatatatttggcattagccgcatgggcacttgaaatgtaattagtacaactaactgaattttaattttaattaatcaaaaaacataaatacatgtggctagtggacagaatacatttaaagtattatcagagattctagaaaaccaatggttattgcaggtgcattgtatgtgtgagaaattctcttcgtaaattcaagttagaaaggaaaaagcaaaagtacactgtaaaaattgtgtgctcataggtaaaaatgggttctgcaggttgcagctcatgaaaactgggttcacaatttttgtagactagtaaactacttttcttaatcttttttgttctaatttttgtctgaattccaatcaaaatcccagcaagatttttttttgggtaatctaaatttaatcttgaaaataaataagtgagaataaccaaaactttttggaaaaataagatggggacaggtgtgatctctcacacctgtaatcccagcactttgggaggccaaggcaggcatatcacttgtgcttgggagttcgagaccagcctgggcaacatggcaagacctcatctctaaaaaggggggaggggggggaaagatgggcaagtagggtatatatttctatagatgtaagaatttcaaatatatgataaagatgctgtattaggcacctctatggacatgtgtccacctacttactctgaaatcatctatatcccctgctgaaaggctgaacctaatatccacattaataacacatatccaaagacactctcaggcatagcaagatcaattagtttcactttcccaagaacttgtatttggggcatttagactgagttgattaattacagaaaataggccacatcatttggtagattttaggcttccactttgagatgtcatggtaaggtcatatgaaagagtgtaagtatctagaaaaaccaatctacaaaaaataatgagaaaactttgctgagaaatgcagatgtcacaccagaggccccaaagagaacagagaagctgcctaaaaacttttcatttccaatgaggggaattatatctcctgcatgatctttcttttagcgggtttctatttcttaaaaagcagatcactcccttaaaaatctgatttaaaaatgggccaaaaatttgaatagacatttctcaaaagatatacaaatggcaaacagacatatgaaaaggtgctcaacatcactgatcatcagagaaatgcaaatccaaactacaatgagatataatttcatcccaattaaaatggcttttattggctgggcacggtggctcacacttgtaatcccagcactttgggaggccgaggggggcagatcacctgaggtcagtagttcgagaccagcctggccaacttggtgaaacccaatctctaccaaaaatacaaaaatcagccaggtgtggtggtgcacgcctgtaatcccagctactcaggaggctgaggcaggagaatcacttgaacccgggaggcagaagttgcagcgagccgagatcatgccactgcactccagcctgggcaacagagtgagaatttgtctcaaaaaaaaaaaaaaaaggcttttatccaaaacacaagcaataacaaatgctggcgaggatgtggagaaaagggaaccctcatacaccgttggtgggaatgtagattagtacaaccactatcgagaacaatttggaaattcctcaaaaaactaaaaattgaattaccatatgatccagcaatcccactgctaggtgtatatccaaaagaaagaaaatcagtatatcgaggagatatctgcactctcatgtttattgcagcattattcacaatagccaagatttggaagcaacctaagtgtccatcaacagatgaatgaatgaagagaatgtggcacatacacaatgaagtactatttagtcataaaaagaatgagatcctgtcattttcaacaacataaatggaactggaggtcattatgttaagtaaaataagccaggcacagaaagacaaactttgcatgttctcactcatttgtgagagctaaaaattaaaacaggtgaactcatggagagagagagtagaagggtggttttcagaggctgggcaaggtagtctagggaggggagagagtggagttgttaatgggaacaaaaaagtagttagaaagaataaataagacttagtatttgctagcacaacagggtgaatatagtaaaaaataatgtaattgtacatttcaaaataactaagagtataattggattatttgtaacacaaaggataaatgcttcaggtgatggatacctcatttaccctaatatgattattacacattgcatgcctgtatcaaaatgtctcatgtacttcataaatatatacacctactatgtacccaccaaaattaaaaattaaaaaaaaaaaaagcaaaccaccctgtttaaatcaggtggcatttcaaatctgtgggggaaattattcaactaatatttagatgaatgactatttggggaaaaaaattagatcctatctcccaccttacatcaaaataatttacagttgaattaaagatcagtatataagaactgaaaccacgagacttccagtctaatatggcagattaggtacacacatttgccctccttcccacctaaaacaccactaaaataaacttacttagtagctgaagttgcaaactggaggtccacaaatcatacctgcttcacaatcatgttttgaatggctacacagagttttataaatttgaactacttaaaaattatgagatgaaaatccatagtgctggtttcttctagaaaaactggttgactggccacattaggcctgtattcttacaggacagcaatccactaacattgactagattgccacatttggatgagacatatactctcaaggtatcacagtccctgccacttaaagaatgtaatcacatgcacttatacttagaccccttctttcattcatgctacctatctggtgctcatttaagttgccaaccctggttacaaaagtgtaaaaagggccaggcacagtggctcacgcctgtaatcccaacactttgggagaccgaggggagtggatcacttgaggtcaggagttcaaaatcagcctagccaacatggtgaaaccctgtctctactaaaaatacaaaaattagccaggcgtggtggcatgcacctgtaatcccaactactcgggaggctggggcaggagaatcacttgagccagggaagcggaggttgcagtgggctgagatcccgctattgcactccagcctgggcaacgaagcgagactctgtcttaaaaaaaaaaaaagaaagaaagaaagaaagtacactccacagagtgggagggggcttgagcaagaggctcaagagcactggttacaaaattttctggagtttaaatactctctagaggtttccattggttattttgttgcacactatgtaaataaacacgtggcctgtgaccagtctgattggttgtgggaggcaaccaatcagaagctgaagggaagctacagttacatcctatgcaaaggaagacatggcccatgaccagtctgattggttgtgagaggggaccaatcagaggctgaagtgaagttacagagttacaccctatgcacatgaagactggttgtgggaaggagaggtactttccattctttaacctgccattcagtagaaaggcagggtgttgcaaacagagtagcctctgatccttttgttacttgggggtggagaggtgagtttttctttttgattcagttttaggaagtcagtgtgaatcggccttaggttccctgcctccagaccctattctcctgcctcaatttcattctctttttttttcttgtattttttacctttttatttttaattttatttttttttacagacagggtctcattctgttgcccaggctggagtacagtgatataatcatagttcactgcaacgttgaactcctaggtttaagcaatcctcctgcctcagcttcccgagtagctgggactataggcacatgctaccacgcctggctactttttgcattttttgtctttttaaaatttttcttaagatacaggatctctctctctctctcgcccatgctggagtttaatggcacaattatgactcacttcattctcaaccctcaacctcctcggctcaagtgatccttccgtctcagcctcccaagtagctggggctacaggtgaatatcaccacatcaggccaccatttcattctcagcagatattgaaggctcaatgaatattactggtagaaataagcaacaaaataaataaatctcacattaactaaaactgcacatgaaaacatttgttaatgactaaaaattgtcagaagaatcagtaatagccaccagtaaaagaactaaatgacagaagacataataaaaacctcgtgtgactggtttttgatgtgaaaaatataaattaatgaatgaaatgtcttccctataagcgttacataaaattagtaaatgacaaaaaataaaagacaataaaagaagaagaaaagctatttgacgaatagactgataatgggattctcatcatttttttctgtaaaatctttgatgttactagaatttttataagcaaatatcacttttataaaaacaattacattttttaaaaacatacacagaaaagaaaacaatatacagggtagagatactaccaaaaggagaagtaactagtttttcagggcttgcagaatcattttactcaatttgataagatttttgtcgtactaatagatccagttatgtgccctctgggaaaaatgcaccaaaaagcgccaaggaagaaagggaactggacagactatccagtaaggccagtcaaatcaatcatacaggttaatgagatgactgaataggaaaacagactgctctcacatctactattgttcagaatattagattaaggaaagagctgagacaaggtttccttgtggaaggacaggagaaaacataacatggttatagctaaggaaaagaatcaatagaaaggaggaaaaataattgacaaacatccagtgatgtgtaaatgtgtagtgggatgtgaatggggaaaagtttgtgtttaaaaaaaaaaaggccctgtatgactaatatggggaccaacaagttttcagtttaaaggtgggacggttccaaatgacaacgaagtcccatgtgtagtggtgctgttgaattaatggctaaattaggtcgtaagtttcaagaaggctgaggaactatggtcaaaatagcagatcatcaacacagatcatgaagtaccccaggatggtgactgcttctcctactccagattcactgagtaacaaggagaatctgacatttttactgccctgatgtgtgcctacttcactaaacctcaaaagcatctttctttaaaagattcatacatgtttccaatgctgttgtcaatatcaattatcttctgaatgaaacgttaaccttgcacaagtaatgcaacatctggcttatagtagttttcacttagaacaatgcatatatttgtttaagttttccaaaaggccaacatttaaagaaacaataaatgtccttaaaaatatgattgtatggccttctgcttttagccatacgaaaaaacagaaatcttatcttgcaccataaactactaacaaattggacaagatatatgaaacagtacttttcagacactgaattgtgatctcagagaaaaggaaacaaagaggtgataactacattactttacttctacagatgaaaacacaataactgaaaagaaaaatccactagtaagatttaacaccaaattagaaatagcagaagagatcaaggagcttgacaaatcggcaatagaaggtagacaaaatgaagcacaaagaagaaaaaatagcttaaaaaatgaacatatagtcagtgatgtataatatcaagctgtctaatatacacataattgaagtctgaaaggaaaaaaatgagtacttaagaaaatatttttaaatggctcaaattgttcataatttgatgaaaactataaaaccatagatccaaaaagctcaatgaccccaagcacacaataaacacacacacacacacacacacacacacacacacacacaccttagttgaattgctgaaagcagagataaaaatagaatttttttttttgagacggagtttcgcagttgttgcccaaagtgatctcagctcactgcaacctccgcctcctgggttcaagtgattctcctgcctcagactcctgagcagcagagattacaggcatgtgccgccgcacctgcctaattttttgtatttttagtagacacagggtgtcaccatgttagccaggctggtctcaaactcctgacctcaggtgatccacccgcctcagcctcccaaagtgctgggattacaggcatgagccaccatgcccggcctaagatagaatttttaaagcagccacagattactctatagaaactatgtaagacaagccaagggcagaatatcttttaagtgctgaaagaaagaaaatgtgaacctaaacttcaatacccagtgaaaatgtgtttcaaaacaaagcgacggttcctatcaataacccaatgaagtttcttgcagaaatagaaaataccatcctaaaattcacatggattctcaaggaaccccgaataaccacaataatcttgaaaaagaacaaaactggaggtctcacattttctgatttctaaacttactacaaagctacagtaagaaaaacagcatggtactggcataaaaacagaaatatagaccaatggaacagaatagaaattccaaaagcaaacccccacatatatggtcaaataattttcagcagcctatcaagaccattcaatgggaaaagaacagttttttcaacaaatggtgcagggaaacctggatatctacacacaaacaatgaagttgcaccattataatatatggaaaaattaactctacatggatcaaaaccttaaatataaaagctaaaaccataaaacttttccaaaagcactggtgataaaaaatggacttcatgagataaattggactcatgaaaattaaaaacgtttatgtatcatagaccaccatcaacagagtaaaaatgcaacacaccaaatgggagaaaatatttacaaatcatgtatccaataaggtattaatatctggaatacataaagaacttccaccaactcaacaacgacaaaagcaatccaattccaaaatggacaaaggcaacatcatactgaatgagcaaaagctagaagcatttcccctgaaaaccagcacaagaaaaggaagcccggccgggtgcagtggctcacgcctgtaatcccaacactttgggaggctgaggcaggcggatcgcaaggtcaggagatcgagaccatcctagctaacatggtgaaatcccgtctctactaaaaatacaaaaaattagctgggcaaggtggcgggcacctgtagtctcagctactagggaggctgaggcaggagaatggcgtgaacctgggaggcggagcttgcagtgacccaagattgtgccactgcactccagcctgggcgacagagcaagactctgtctcaaaacgaaaaaaaaaagaaaagaaaagaaaagaaaaggaagccctctctcaccactcttattaaacatattattggaagtcctggccagggcaatctgacaagagaaagaaataaagggcatccaaataggaagagaggaagtcaaactatccctctttgcagatgacatgatcctatatctagaaaactccacagtctcagcccaaaacctccttaagctgataaacaacttgtcaggatactaaatcaatatgcaaaatttactgacattccaattcaccatcaactgtcaagctgagagccaaatcaggaatgcaatcccattcacaattgccacaaataaataaataaataaataaataaataaataaataaataaataaaataactgggaatacaactaaccaggtaggtgaaagatctctacaaagggaactacaaagcactgcttgaagaaatcagagatttcttacaaacaaatgaaaaaaccttccatgttcatggataggaataatcagtatcattaaaaaggtcatactgcccaaagcaatttacagattcaatgctattcctattaaactaccactgacattcttcagagaactaggaaaaactcttttaaaactcatatggaaccaaaaaagagcccaaaaagccaaggcaaccctaagcaaaaagaacaaagctggaggcatcgcactacccaacttcaaactatactacgtggctacagtaatcaaaacatcatggtactggtacaaaaacagatacatagaccaatgaaacagaatagagagcccagaaataaggtcacacctacaactatctgatcttgaacaaacctaccaaaaacaagcaatggggaaaggattccctattcagtaaatggtgctgggataactcgctaggcatatgtagaagattgaaactggaccccttccttacaccgtattcaaaaattaagatagattaaagacttaaatgtaaaacaaaaactataaaaaccctggaagacaacctaggcaataccattctggacataggaacaggcaaagatttcatgatgaagacaacagaagcaattgcaacaaaagcaaaaattgacaaatgacacccaataaaattaaagagttaatgcacagcaaacgaaactatcaacaaagtaaacagacaacctacagaatgggagaaaattttttgcaaactatgcatctgacaaaggtctaatatccagcttccataaggaacttaaatttacaaaggaaaaacaacctcattaaaaagtgggcaaaggacatgaatggacacttttcaaaagaagatatatatgcagccaacaatcctatggaaaaaagctaacattactgatcattagagaaatgcaaatcaaaaccaccacaatgagataccatctcacaccagtcagaatggctattattaaaaagtaaaaaaaaaaaaaaaaaaaaaaaaaacagatgccggtgaggttgcagagaaaaaggaaaaaggaacacttgcacactactggtaagaatgtaaattagttcaaccattgtggaagacagtagacagtgtggcaattcctcaaagacctaaaaacagaaacaccatttgacccagcaatcccattactgggtatatacccaaagaaatataaattgttctattataaagacacatgcacacgtatgttcattgaagcactatgcacaatagcaaagacatggaatcaacctaaatgctaatcaatggtagactagattttaaaaatgtggtacatatacactgtggaatactatgtagccataaaaaaaatgagactgtgtcctttacagaaacttagatagagctggagaccattatccttagcaaactaatgcaggaacagaaaaccaaatactgcatgttctcacttataagtaggagctaaatcatgagaacatatggaaacataaaggggaaaaacacacaatggggcctatcagagggtagagggtgggagcagggagaggatcagaaaaataactaatgggtactaggcttaatacctgggtgacaaaataatctgtacaacaaaccactaccacacaagtttacctatataacaaacctgagcatgtacccctgaacttaaaataaaaattaaatttaaaaaaaatggggctgggagtggtggcttacacctgtaatctcagtactttgagaggtaaggcaggaggatcacttgagaccagaagttcaaggctagcctggccaacatggtgaaaccccatctctattaaaaatacaaaaaattagccaggcgtgggggcacacacctgtaatcccagctattcgggaggctgaggtgggaggactgcttgatcctgggaggcggacactgcagtcagctgagatagtgccactgcactccggcctgggcgacagagtgaagccctgtctcaaaaaagggcaaaggacttgaatagacatttctccaaagaaaatacacaaatggctaataagcagaagaaaagatgctcaacatcactaatcattagggaaatgcaaatcaaaaacacaagataccacttcacacccttaaaaatggctattctttaaaaaggacaacaaaacagataatgaggttggcaaagatgtggagaaactggaacccctgtgcattgctgatggaactgtaaaatggtacagccactgtgaaaaacagcttggcagttcctcaaaaacttaaatatagaattaccatatggtccagaaattccactcttaggtgtatacccaaacgaatgaaaacagagactcaaacagatacgtacaccaatgttcacagcagcattattcaaaatagcaaaaagatggaaacaacccagatgtccactggcagatgaacggacaaacaaaatgtggtatatccatacaatggaatattattcagccataaaaagaaataaaattctgacacatactacatggtggatgaccttgaaaacattatgctgagtaaaataagccagacacaaaaggacaaatattgcatgattccacttacatgaggtatctagagtagtcaaattcatagagacggaaaggagaacggcatttttcctggggctggacaatagggaaatacagagatattgtttcatgggtatggtgtttcagtttggaaagatgaaaaggttctggcactagataatagtatataaatatgcataataccactgaatttacacttaaaaacagataaatggtaaattttatgttatatatattttaccattaaaaacatgaaggtaagaaaaaaagctgaaaaaatatttgcaatgcaaatgttaaataaagctctttaagctaatagaaaagttacacaatacagaaacttggacctacaaaatgaagggcaccagaagtgaaaaactggagggttaagaaagaaattattttcctcatttgtaaatttgtacatagctgatgatttaaactaaaaataacaaaacactgtgagggctatgacaaatgtagaagtaaaatatttgacaaaaatggcacaaaacatgggagagtagacacggaagtatattggcagaaggttcttacacattatttgtgagttgaaatattatttgaaggtacactgtgataagtttaagatgcaaagtatgaagcaactcacaaaaataaaactaagaggtatacttaagaagacagtggtgaaggtaaagtagaatcctaaaacatgtttaattaattcaaagaagacagaaaaggggaataaagaaaagttggaacaaacagaaaacaaatagtaaccacagtgataattacactgaatgtaaatagtataagtgttccaattaaaaagaagaggttgtcagattggataaataaagaagacaattatttataagaaacttatcttaaatctaaagacacaaataggttaaaaataaaaggatgaaaaatatatactatggaaacattaatcctaagaaagctggagtggctatatcaatgttagccaaaatagatctcagaacaaagacatttcataatgacagatgggttaatacatcaagaagacataataatcttaaatgtgtatacagctaataacagaccatgaaaacccatgaagcaaaaactggtagaattgaaagaaaaggcaaatccacaattataggacccttacagtattctctaattaatttataagtagaccaaaaaaaaccagcaaggatacagaagatcttagcaagataatcaacaaacttgacctaactgatttttataaatgaatacccatactttccaaaaactcacagagcatttgccaagacagatcgtcaaatttaaaagaactgaaatcatatagaatctattctctaaccacacaaaaataaattagaactcagtaagagaaaaatatctaggaaaaaacacctagttagtgtttatttagacttctaaataaatcttgggtcagagaagaaatcacaagggaaatcagaaaaaaatgtaacaacatcaaaatttgtgggacacagataaagaagtgcttagagggaaatgtatagctttcattggtgttttatttaggaaaaaaaaaggtccaaaatcagttatcaactatttaagtttcaatctttttttttttctttttttttgagacggagtttcgctcttgttgcccaggcttgagtgcaatggcacgatctcagctcactgcaggctccgcctcctgggttcaagcaattctcctgcctcagcctcccgagtagctgggattacaggcgcccaccaccatgcctggctaattgtttgtatttataatagagacagggttttgccacgttggccagcctggtctcaaactcctggcctcaggtgatacgctcgcctcagcctcccaaagtgctgggattacaggggtaagccaccatgcctggccaagtttcaatcttatgaagctagcagaagagaaaattacatccaaagaaagtaaaacaatggtaattaaaaaaaaaaaaagcagaaaccaacaaaatagaaaatggaaaaacagaaagtcaacaaaaactttttaaaagatcaataaaatggataaacctctactacctattacagattgagcaaaatgaattctagattaagcaaaaaaaaggagatagacacaaattcacaaattatgaatatcagaaatgaaagagggcatatcactacaaatcctacagacacttaaagaaataagagaatattttgaacattatgccaataaattcaaaaacttgaatggacaaatttattgaaagatactaattactaaaactgactcagaaacagaaaatgtgaatactcctatactcatttttaaaattaaatttaaaagtaaaagtcttcccaaaaataacacataagggcaagatggcttccctggtgaattctatcaaaaatttaaggaagaagtaatatcaatacttcccaactcattttataaagccaacattaccttgatatcaaagccagataaagacattacagaaaactatagaccaatattcttatgaacatagatggaaagaatccttaacaaaatttagcaagtcaaatctaacaattatataaaatgggtcctataccatgatcaagtgggttttattccactaatttacagtcaggccaacattcaaaaactaatcaatgtaatttaccatatcaacaggatataggagaaaaaacatataatcctaccaaggaatgcagtaaaactttaaatataaaatccaacatccactcattataaaaatgttcagccaactagcgatagaaggaaacttctttagcctgacaaagggcatagacagaacacctagcacaaatgtcatacagaacagtgagggaccagaatgttttccaccacaaggttgtgaacaaggcaagggtatccactctcatcactctaattcagccttgtactgcatgaaaggtaaacactgtaaaggaagaagtaaaacagtatttactagagaatgaaacatgcaactttgggtacttagaaagtcctaaagaaactccaaaaatatcaactagaaccaataagtgatataacaagttgcaggttacagggtaaatatacaaaaatgaattctacttctataatagtaatgaataactggaaggaaattataagtggaatcatacaatatctgtccttttatgactggcttattttacttcacataatgtcttcaagtttcatctatgttgtagtacatgtcagaatttccttccttttaaaggctcaataatattccattgtatgtatacaccacattttgtttattcgtttatttatcaatggacattttggttgtttccaccttttggctattgtgaataacactcctatgaacactggtgtacaagtatctgagtacctgctttcaattcttttggatatttgcctagaaatgttatttctggaccatatggtaattctgtttttaactttcagaggaatcaggaacaaggtttttcagttaaacatacagaaaggaagaaaattagaatgggccctctggtactggaatggaactggatgtattggtataaacactcataattttcagtgtacagacagacagatacagaaaaaatatagacataaatgtatatgtctatgagtctgggtttgtgtacacaatacattgtgtatattctctagctgtctgctgaaagggcctggagcagcaactccaacagcaatgagcaaaactaactcccagaacacagcgttcaaatgttatttttcactaaatggaaccagggttccttggagaaatgtctgaatccgagactagggcagggaaaatataaggtgagcctggaacactatcttttgccaaaaaataaggaagcgttccaagaatgattgatatatgtcagaaagacacaagcaacttaactggtttcccacttgagtaccaaaacaaatcatataataattataactcaccgaataaaatggaaaatcacaagtccataaagatataaataaaatgagtaaactgaatttttgtaaggacatgttatttatataatttcagagttcttccccataaagtcctcttttataaaggcaaaaagataactgtaaagttatattttttacctagcagatatcatattaatcaagttatcaatcattaatgagaaaaaatgaaactgcgtgccaccttataagatgcaatgagcagaaggcatcacttctgtgacattcctgccaaagataaataacctcagtctaatgagaaaacccaaattaagagacattctagataagctgtaatattctgaagtgtcaaaatcatgacagtcaaggaaagactgaagaagtgttccagactgaagaagttactaaagtgataactaaatgcaatgcatggttctgactggattcttttgcttttataaaagcgttattaagacaactgctaaaatttaaaccggttctgagtattagatggcaacaatgaatcaattttaacttcctgattcttatggttatattgtgattatgtataagaatgtctttgcttataagacatagacactaaagtatttcagggtgagggaacatcagggcaacaacatactcttaaatggctcaataaaaaaagatatttggattgtacttccaatttctctataattttgtgacagccaaacttttaaaaagctaaaataaccgaaagataaatttactgggcagacagttggtcaattaacgaagtagttttcaaaggtaaagttatctttccacacccagtatccatgaatgaaaacgttctacatgacaattgcagatactatcaccactgaatagctacactcatgtcggatgggttgctatacatatttatttcattaatgtatctacacatcaagaaaacttagaggagtggctgaattttgtcaactttctctgaaatattcaccaagttcactcaatatgataaagaagatttgaaacttttgagaattaaacatttccaccatagagaatactatgttttctccaagctctcaaaaaattataattactgggccaggcacagtggttcactcctgtaatcccagcactttgggaggccaaggcaagcggatcatttgaggttgggagttcgaaacatgcctggccaacaaggcgaaaccctgtctctactaaaaataaaagaaattagccaggcatggtggcaggcacctgtaatcccagctactcgagcggctgaggcaggagaattgcttgaacccaggaggtggaggttgcagtgagccaaaactgcaccactgcactccagcctgggtgacaaagcaagactccacctcaaaaaaaaaaaaaaaagccataattattggagctgaaggacatactcaagcaattagtcatccattctatcatcctacccctaggcaaatttgcagacaaggcaagagattcacactaactccactaacctctggcctaacttaaccaagattacaatagtatagaacgggctggcaaactttttctctaaaaggccagagattttcctgctggctgaacatgaaaagaaagaaaagaaaaatacataaatagacagagtatatattttaggttttgtgagccatatggtctctgtcacaactactcaactttactgttataacgcaaaagttccacagacaatatgtataaacaaatgtaaaatgcgttcaaaaaaactttatttataaaagcaggcagcaggctgtattctgcccatgggtcatagtttgccaaccactggcataggaaaaaagattacgacaaaaaagtatccatcaaaatagacctgctaaattttactatgaccgtgatatattaggtgaaaaataaaagctatatactataatcctaattttgtgtgtggggagggagtatatatgtaatatatgtgtaatatatgtcatatatactacataacaaatatatgtaatatatactacagtatcaacccctttacaggggttgagctctgtacaacacctgattgcaggagtgagccaccacgctcggcccaataattacgatttttttgagagcctggagaaaacatagtagtgttctctatggtggaaatgtttacatatatactcagttgatactgggtatatatgtaatatatactacgtaacaaaaatggcaacaaattctacttatctttgtatataagctccctttcaaggttactttgtagctcttcctaccaagatgtgagctttaccccttgagtctggatttggtcatgtgatttgcttttggtgactggaacattagcaaacctgacacaaacagactcaaaaggcatttgtacactggggcttgttctcttgctgctcttggaaccctgaggccaccatatacataaaccagaattagcctgctagatgatgagagagacccacctcatggtcccagctgactaccaatcaactccctgaagcagggctgccttgctgacttacagctgacctgcagttgaccacagacacatgagtaggccacctgagatcagcagaagaaatgcccagctgagcccaccctaaattgctgacccccacaacagtaagctaaataaatggttggtttgttacagcaacagataacattgcatgtgtgtgtgcacgcacatgtgcgcacttaagaatagacagcaggcagaatatcaggggttgatattgaggagacagtttaattaaggattaatgttaataatttaagtacacattttggtggttcccaaattttctcttagatgatgcttttatattcagaaaaaagttatttagaaatataaaatttaattcaatataaaagagtatttttcattatttccactaaatattgaaagtctaaaaatatggacatcttgacctgatgtatttaaatgaactgatagattttactttctaacagagagtttggagataaatagttacaggtacataggaaactaagcaaaggacaagacaactactagcaccaaaaaaaataaatactggtttggggaaagaactgtaataagtttaaatatttatagaattataacaatacaaataccaaatgctggcaggctgaagggtagaagtaatgagaaaggagaaaagaataggaggaagacaacagaaagtatctaaaaccgaaaactcaagagaaaagcaaaatatgcatgctacttcaaaaactatcagaatacaaaggataaataattgaaaattatttacttcagatagtgggaattggtgaataatagaattagggcaggggtctactgcttttctgtttgaagccaagtggaattctttgacatattttttcacacatactgttaaaaaaaaaaaattaaagagaaaaaaaagtccaggaaccaatccaagtacatataacaatttagtacatgataacagcaaaacttcaaaactggaaaaatgattaagtgacactgggacaactgatcaactatttgggaaaatatgcaattagagcctgacctcatacatgcatgaaaataaatcccataaacaagagagttaaatgcacaaacaaaactgtaaaagaactattaaaaatatccttataaatttatagaaacggatctagaaagatcctcatgaaagtgttcatggtgtttccttctggaaagcagaaagggagatggggttaacataagggagaacattttaatttttattctgtattggtttttataatgttaaaggtttttcaaaaaatgttattactcttttttttttttttttttttttgagacaggttttgctctgtcacccaagctggaatgcagtggcatgatcacagctcactttaacctctacctcccgggctcaagcaatcctcctgcctcagcctcctggtagctgggaccacaggcatgagccaccacaccaagctaattttgtttgtttgttttttgtagagacagggtcttgctatgttgcccaggctgatctcaaactcctgggctcaagtgatccacctacctcagcctccccaagtgctgggattacaggcataagccatcatgcctggccaaaaactatttttaaatctgcattaagtcacctgtatttaacaatactgtcataccctcttaggtataaggatctgagtaaaaattgtaagctacaagaaacagtggtgaatcatacatctacttaactatggccatttttttcattcatttattcaacaaataatacaagtagctactaggtgcaggctctgtgccagatgctggttataaaaaactgaaaaaaagagacattacacttgtccttatggtcagtctggtaatgagacaaacaaaacaaaaaacagttaaacctacaaataaataaataattataaatttgggtaagcattgtaaatgcttagatttggtgttgagacactaaaaaagggacgaatcttgaataaataacctgcatggtaatgcatataatatgacctgtaacagtataaaaatgaactgtcatcaaaaagtcatctggaagagtttattcagagacagaatagtgaggtggtttagaggatcaattccagagccagactgcctgggttttaatccagcttctactcaccaggtttgtgacatgaacaagttattcaaatactctgtggctcagtttcctcagctataattgcggaaaatattaataccttcctgatacggttgttataaagattgagttaaattcttttattttgaaaactgtcaaacccaaagaaaagttaaaagaacatgacaataagcatcaactcacatgaacctgtatttgccaggtgaattaatatttctaaagtgcttagcagagtgtctggcacataacacagtaagcaccagtatcagcatatatatgcagttatgttaaatagctattttaaataaaagtaaattaaaaccataaagtaaaagaaagaagggtaggaaggaaggaaataaaaatggggtatgggaggaagaaaaaggaagaaaaatagcctaaggatcgccccagtgttaacactttgtaagaaggtcaacagcgcactctgctggacccaagtgtcttccacacaccaggcccaagttatgaattaaaataatatgctactgctacattaaatcaaatataattactttaattaaagtatataaagaatgttagcatttatttaatgaataaataaaaagcaggtataagcataagaatatatctgaagacaaccctggctattgtgaggatttactaaaaaaagaacagaatataaataaatctagagaaaatgattatgaatgatagaacaaagtaatatcaaaacgttaacatactattctaaaaaacaatgtttttcttaactatattttgaccatgtggagacagatgcttcactagaactttgacatatgaattgtcagattaagaaaataaatctgaactgtaaggaaagggatcaagcaggggacaccagaaagttaattatataagaaaaggtactgacactatcttccgacttgaaaagagagttaggagactagaaatgatagaaaaataaagagacaacaatctacttctccaatccactaggtggaaactaaatgattttcataaaaactaagaaaatttgaagaacctaaaaagtttaatgtcaaattcaggggaaaacagaaatcatcaaactaatttaccatttaatttatggaagaaggtttgtcaaaagtaatgcaactgcagatttgaaaaacgtgaagactaagacacacctttgcagggatgagaattaaaccattaatttatgaatccaaataaatatttctatttaaaaaatactgtactccctagtatcatataataaaaagcaagataggaaaagcgtccttagaatttaaaggtgttagaattcaattagatataacgtatctcctgacctcgtgatccgcccgcctcagcctcccaaagtgctgggattataggagtgagccaccatcctggctaacacggtgaaaccctgtctctactaaaatataaaaaattagctgggtgtggtgacgggcgcctgtagtcccagctacttgggaggctgaggcaggagaacggtgtgaacccaggaggcggaacttgcagtgagccgatcgcgccactgcactccagcctgggcgacagagcgagactccctctcaaaaaataaataaataaataaataaataaataaataaataaataaataaagcatcattaaatctagtctcccattctttttccttccatatgaaggaactggttttcacaaaaaagttacttacccaagtctatcaatttaccttattcaagattattacaaggtctagattaaaatacaacagataaaatgtgaggcattttggtctgaagaaaaaagcaaaaataaaaaaatataaaaaaaagtgaggcatatgatctgtcagcataagaaaagttctaatatatggactacttttttttcaattactttatccaaaagttttggcaataaactcatttcaaaagctgctgtataataaatattaaaacttacgacattaatacacatgaaactatttttcttctacttttcatgaaaccacctatcccaaaatctacagaaaatacttttatgatttataataagtcactttgcaaagactaagaaatgttacagcagaaaccaaagtaatttcctacaaggaaaaatatttactcccctatgacacccaaaaatcccattttttaaataaattacctctactcatatccccattattttttcttatattacattcttggaaataattagtccttgttctctgaaaacctagatgtattatttaatgctagaaatccatgagaaatttactaaaaatttacttaacatacaaaaaggagaaacattcatgctcactaaaactatacattttataataattatatttctattataagtacttatcctatttttatgttaggaagaaaaaaataaagttgaaaatacaaatcattttacctatgtatttttgggtttttttttcccataacctttcagaaagcacataaaattactttatacgtcatgtttttcatcatagactaccatgaaaagaaacaaatattagagctcaaccatatgttctttgcattgcaaaagtgctttgatgtctgttaaatttactttatgcatgtttaattagtatgacatatatctcttacatcttcttgcaaacaaaaattcagtgtcacactagtgaaatgttatcatttgagggactagatttaattgagagatttaacttgttcaagaagttttcagacttatgagaaattgtcagaggcctatatcttaatgttatgagtaataaatcacccacttatgaaaaattattccatttctagagatatgtagagttataccacctaaagccaaggaagaaaatatgcaatttctagcttaaaaataaaacagatataaagatacagatatacaattatagatacagctatattttaccaatgagcagaccataatcaatgatcaacatatatcagcatactacataaccaaaaggagaaatcaatcaaagcattaggcttaaaattaaggtactcaaccaagggcacagtagatgtgcttatggtcaagcggtttagactcaaaagatttcagccataaacatcttcaacagatatcaaaagaatttttggccaggttccgtggctcacgcctgtaatcccagcactttgggaggccgaggcaaacagatcacccgaggtcaggcgttcaaggccagcctggccaacatggtgaagcctcatctttactaaaaatacaaaaatgagctgggcgtggtgtcaggtgctacttgagaagctactcaagaggctgatttaggagaatcacttgaacccaggaggcagaagttgcagtgagccgagatcgcccactgcactccatcctgggtgacaggggagactccgtctcaaaaaaaaaaaaaaaaaaaagaaaaggaattttctactaaactctaaacctaactcctcaaaatttataatgttgatcagtattatcaacaataacattaataatagctttcagcagcatttaaaaataagaactacaaggccaggtgcagtagctcacacctataatcctggcattttgggaggccaaggcaggtggatcgcttaagcccaggagtttgagagcagcttaggcaacatagcgaaaccttgtctctaaaaaagttaaccaaataaataaaatgaaaataagaactacatattactccaagcaacctacagattcaatgtaatccctatcaaaataccaataacattctttacaggaatagaaagaacaatcctaagattcatatggaaccacaaagaccctgaatagccaaagtaatagtatgcaaaaagaaaactgtaggcaccacgctatgtactacacaaagctatagtaaccaaaacagaatggtattagtataaaaatagacacatagaccaatggaacagaatagagaaccgagaagtaaatccaggtatttacagttgactgattttcaacaaagatgccaagaacacatatcggggaaaggactccctcttcaataaatggtgctgagaacactggatgtccatatgcaaaaggaaaaaactagatccctctcaccatctacaaaaaccaactcaaaatagattaaagacttaaacataagacccaaaactataagactactagaagaaaacatagggcaaaagcttcaggacactgatctaggcagattttatgggtaagaattcaaaagtacaggcaacaaaaacaaaaatagacaaataggacagtatcaaactaaaaagcttctgcacagcaaaggaaacaacagagtatagagacaacctgtagaatgggagaaaatatttccaaactattcatctgagaagggactactatccagaatatacaaggaactcaacagcaaaaaaaaaaaaatctgattttaaaataggcaaagggtgtgaataaacatttctcaaaagatacataaagccaacaagaacatgaaaaaatgctgaacatcactaatcatcagggaaatataaatcaaaagcacaataagatatcatctcactcagttagaatggcttactatcgaaaagacaaaaaaaaataacaaatgttagtgacgatgtggagaagaaactcatatactattagtggaaatgtaaattagtacagacattacggaaaacagcaatggaggcttctcaaaaacctaaaaatattactaccatataatcatataatccagcaatcctactactatttatccaaaggaaagaaaatctagagtacagtagcatgatcatatctcaccacagtctgaaactcctagagtcaagtgatcgcccatgcctcagcctcccaagtagctaggactgcaggcacgtaccaccacgcctggctaatttttttaaaaattttgtacagatggggttctcgctatgttgccggggctggtctcaaactcctggcctgagtgattctcctacctgagccttccaaagtgttgggattactggtgtgagccaccacacccagccaacaccatgtttattgcagcgctattcataatagacaaggagttggcatcaacctaaatgtccatcaacagatgaatggataaagaaaatgtgacacatatacacaatggaatattattcagccatagaaaaatattgaaaccttgttatttgcagcaacatgggtaagcctggaagatattaagtgaaataagtcaggcataggcaggtaagtactgtatgttcttactcatatgtaggagctaaaaaaaatgagctcatagaagtagagtaaattgtggttatcagaggttaggaaggggtgaggggaggggaggataaggagaggtgggtttacaaattcataactacagctagattggagaaacaggaggaataagttctggtattctatagcactctagggtaaatatggttaacaataatttcttacatattttcaaaaagctgtaagagagaattctgaatattcgcaacacaaagaaatgacaaatgtttgaggcgatggatatgttaattactctgatttgatcattacacatcatatacatgtatgaaaattatcacactgaatcccataagtatgtataattattatgtgtcaacaaaaataaacaaaaaataaagatcagaactacaaatatgtaatattattagtcggtattatatagaatcttttatcagcagcagctaaaggtaagaactacaaatatgtatccatctgctgctgttactactactacagctgctgctacttctactaccacttggcgcttaaactctaaggtatgccagatactctcagcactgtatagatatcaacttgtttaatcctcctaacggccccgtgagataggtactattactaaccccatttaacaaatagctaaacataataccaagagtttaaaaaatcaaggttatacagttaataaagagtagagctatgattaaaatccaagcagtctcaagatatgaaaataacctaagtgtctgtcaatggatgaataaagaaaatgtggtgtgtatgtgtatgtcaatggaatattagccctaaaaaagatcctgctatttgtgacaacatggatgaacctggagggaggacattatgcaaagtgaaatatgtcagatgtagaaggaaaaatactacatgatctcacttatacgtggaatctaaaaaagtcaaatacatagaaacagaaatcagaacaatggttactggggcagggaggtgggggatttgaggagatgttgatcaaagagtaaaaagttgaatctacataggatgaatcaagtctagagatctaatgaacagcatcatgacaacagttaataatactatattctaggctggatatttcgatattggctttaaaattttcaggtgttctcaacacacacacacacacaaaaggtaactatgtaaggagatgaatatattaattagcttgtgatatgatttggaagtgtgtcccctccaactctcatgctgaaatgtgatcccccaagttggaggtggggcctagtgtaaagtgcttgggtcatcaatggctggtgccctcctcacagtaatgagttgagttcttgctctgaggtcacacgagatctggttatttaaaacagtgtggaacctcctctgctctctcctctgtcctctctttccatgtgacaagtttgctctctctttgtcttctggcatgcttgtaagcttcttgaggccctcaccagaagcagatgctgacaccatgcttcctgcacagcctacagaactgtgagtgaaaataaacctcttttctttataaattgcccagcctctggtattgctttataacaattcaaacagactatcacagcttggctgtagtaataatttcactatgtatatatatattaaaacatcatgttttacacctaaaatatatataatttttattttatgtatttattttttatttttttttagagacagggtctcgctctgtcacccagactggagtacagtggttcaatcatagttcaatacagcctcaatcttctggctcaagggatccccctccctcagcctcctgagtagctaggactacaagtacacaccaccacacacagctattttttttcttctattctttataaagacagggtctcgttatgttgcccaggttggtcttgaactcctgacctcaagcaatcctctcaccttggcctcccaaagtgctgagattataggcatgagccatgatgcctggcccaatctttatttaaaaattaagatcaggcagtatgtgtccaaagtccattctcttaaccaataaaaacaaaacaagccaggtgcagtgattcatgcctataatcccaaaactctgggaggcccaggcaagaggatcactggaggccatgagtttgagaccaacctgggcaacacagtgagacctcatctctacaaaaaataaaaataaaaaattagctgggcatggtgttgcacagctgtagtccttgctattcaggaggctggggttggaggatcacttgagcctgggattttgaggttacagtgggctatgatcacaccactgcgttacaacatgggcaacacattgagaccctgtgtctacaaataaagcaaacaaaaacaattcccaagaaaaaaaaatcttaatcacaggtgactctatacttgatttgtttatctgtgagcttctacatatttctttccttatcttggtgttagaaccctatttaggtggctccaggactgcaaagaggcattttagagagaatataaaataaagtgattagggcatttgccagaacatgagaatgcctaggcaggatttagctctactatttactagctttgtgatcttaggccagtttcttccttctcagagtttcctcatctgtacgatgggaataccaatatacctgcttcataatcattgtaagaactcagtaacattcaacaaataaatatttattagacaactaatatgcaccatatgctattctaggcatgagggacacacatgaaaaagactgacattacatcgtaataggacagacaaataataaacaagtaatcaagtaatttcagataatagtaagcccatgaaggaaaggaaagaaaatgaatgagaaaacactgtggcagagctcaacatatagcttacattataatgatgttgatgattattgcaatttaacagaagaagcttctacataatttctccaactattaatataaagcttcagtgaagatcaccaacaaaacacaaattaaatgtacagtaactgaaaacaaatctgtggttgcctgggaatggggggacagggcagaaaaaaggtccatcagtctatcttgcacttaggatggaccttttctaggcatcattttgcaatatcatgcactggtcatttaaataatatttagttcgctgagtttaagttcattgagttttacagatcttacaaatgttgacacatttcattatataaatataaaaagtcatattctgtaatatcaccaatttcatcagaaaagtctgtagttatcacaaagctgccaagctcagagtatatacaaattttttaaaattctgattttcacttgaaagctcaaattttatctggctcattttatcataaagaattaccatggttagtatatcattcactctttttcaagcaaaaatgatgttccatgacaaaaagtggctagtcagctcacaatccaaactatcctacaggcgcttctccccaggacatccatcctgcttctgtatgcaaaagtgttttatgagttctattcatttcttcagacagaatgttaaaaacctaaacggctgagattaaataaaattagtaatttttactgcttcatcaaagacattcttaaatgaaactggttttttttcaaaactgtgatctaatgatgctggaaaactattattaacataggttgggttgaggccaaggtgggcggatcacgaggtcagaagatcgagaccatcctggctaacgtggtgaaaccccgtctctactaaaaatacaaaaaattagccaggcgtggtggcaggcgcctgtagtcccaactactcgggaggttgaggcaggagaatggcatgaacccaggaggcggagcttgcagtgggcggagatcacgccaccgcacttccagcctgggtgacagagcgatactccgtctcaaaaaaaaattaaaataaataaatttaaaaaattatatacatatagagagagagagagagaaaaagagagagagagagaaagagagagagagagaggttggagccaataccttgatttctgctaaggcaccaacagttttacccattcttgcttttgcgccaccagtacaaatgtcaagacaatccaaaaggcaataatgtattttttcctttttttttttgagacggggtctcactctgtcatccaggctggagtgcagtgtggtgcaatcttggctcagtgcacctttgcctcctgggctcaagccatcctcccacctcagcctcccaagtagctgggactacaagtgtgcaccacaacacccggctaatttttgtattttttgtagaatcagggtttcgccatgttgcccaggctggtttcaaactcgtgaactcaagtgatccacccgccttggcctcccaaagtgctgggattacaggcgtgagccaccacgcctggcctacaacatcttaatattattacaaaaataattttcacctcacagatcactccccaaaaaaatctcaatatctagaactccttggactactccttgagaactgttgccctaagaatcctgaaagaactgtaaggagttggagaatttacaaacattaaaatacagaacagaaaaaaatgactttcagatctctctctagtccaattctcttattttataaataaggaaacgaggcatagagagaataggctttgccatctcacacattagtaacagagatgtgacagcattgaggacttctgagtgggttgctactgtcctttgtattatactattgttcctcttttgtcaaaaattggtttagaaaattccatatcttccttctttaaaactgaacaatggcattaatacatactttctgtggcgaaaaggagtttatcttttccagtggagagttgagttttacagtctttcctgaatcaacttttgcatccaaattgtgtacttctgttccaaagcaatgacgttttctaatctgtaaacacagaaccaaaatgaagtttaaggtgaactagaagtttaactggctagttgttctcaaaggccaaaacagctctatgtatttttttcctgcatccaaaaaaagactatttctaacaggcaataataaaagaaattttaaaaatgcaaataagcacctcattacaacacttaaaggaaatagaacatagtagtgactcatgaatcttagccaaactatctttaattagtgatgtatcaaaattagagtattgtaaaatgaacttctcataaaatagtcccatcatatggacatcaaatatagcaatattggaaagtccaatcttatatctaattggaaaataaaagtaaatcaaaatttaagcataattctacattgaaaagaactcagaataaaacttttaatgtaaacagtcatgatttcctacaggatggaataaattactcgattactattatcactgttacttactagatatttgataaaccaagttgcctttgattaaatttcttttataaataccactaagttttctttccaaactgtatccatgcttttcctatttgtgaaaaatctattcactatataattggggagaaaagcatttctattgataatctcattcccgccaaaaatgaaatgagaaccagtgaagtgagggaataaatgttttatgttgagccctacctgatgacatgcaaatctatgaatacattttgtcggggggaaatctctataggttcacacctcatttgtcattggtactttgataaaataaactagttcattctatttctaaaaacaaggctgaattatagaaatttataaagactgtaagtggaacagttaaactacataagacttcaagaaccttgagtatactcaattaaaagtacccagttacttacctacaaataacatcctaattaataatttttttattttatgtttttatttatttattttttagagacagggtcttgctctgtcaccaaggttgaagcataattgcatgatcttagctcaccacagccttcaactcctaggcttgagcaatcctcctatctcagcctcccaagtagctggaaagtagtctgtagggctacatgtctgatgagcctgtagggctcatgccaccacacccggtctttttttttacttttttgtggagacaggagccttgctatgtcacccaggctggtctcaaactgctggactcaagagatcctcccacctcagcctcccagagtgctgggattacagtcgtgagccactgtattcagcctaataattatcttttttatttgtaactaaatctattaaaatcccagccttcctatctcactgccatgaattctgagaaaatattgtgttcatctgcatccaaatttcatttaaaatatctggtaattcaagccttttagtaatttttagaaataaatatacatattttatcatgtatcaatcttaaaaactcagtaagaatacatcttgtcattacattaaaactatcaattccaaaatatccataacatgaataatcatatcaaaggtattttagccaaaaggaaatgctattttaagataaaaacaatggaggagttaaaaagtacaaagtagtatatcactaagatatgccttaagtaaatattttactatcaaattcctcatatataagaaacaccatgcagtttcacttgaacgacatgttactgtgaataatctgctataataaactcctttgtaacaagtaactctacaaaatgaaattacaacaaattattaatttatggctgtcacatgacccaactaatctccacaagtgcattaaaaacatgatacttgactaccatgttcagctgtaactaactgggttatttactgccaataaactctgtttacctgctgtgtagtttctaagggtcgaattcttttcttctctacttgaaaatcatcattttcatctctgtatatggatgcctgtttcttagcagataactttgcagccagagtggttttttcaggggagtcttatataagtaatttaaaaaaaacagcataaataacttacaggtaggcaatttttctagaagaaaactggaaccaggatgtaaggcttatttctagaaatttcataccataatctaaaacatgaaacttaaacatgtttaaaaagtacttctctaccattcagtttactttaccaaagattctgagaaacatgctttcaataggaaaagtccaatttgattttttaaatcgccttatgtacttgtagactactcccaataacatgatttaaaatgtataactgcaaggatctctgaagaaaatatatttcatgtctgtaaaaatctttctttacagtatcaacgtttcttccctactaagtttctccacgttctttagagcaaaaccattgattatagaatcaagctcatataatctgtcttttaatcccataatcctgaaagctccttctcaaggtcatccaggacctcttaatcaccaaataacattaattatcccaatcttacaaatgtgaacactaggtttttaaaagtctagtagcttgcccagtatcatacagttattaaatggtagagcctagacatgactgaatcctgctgtgtgactccaacatccatacatgtaacctcttaggcatacagccaacactgtcttcttggaacacagcaaacacattttcttcttccttaatgtctgtaacactgctcttaactattctcatacattggtttctcccttttcctaaatataaatattcttaaaggtaccctccttcctctttgcttctctctaagcattctctccactcccatggcttgaattaatttaacaatcttttttaaccatctttttttttttttttgagatggagttttcctcttgttgcccaggctgaagtgcaatggtgtgatctcagctcaccacaacctctacctcccaggttcaagcgattctcctgcctcagcctcctgagtagctgggattacaggcatgtgccaccacgcctggctaattttgtatttttaatagagacggggtttctccatgttggtcaggctggtctcgaactcctgacctcaggtgatccacccgcctagcctcccaaagtgctgggattacaggcgtgagccaccgtgcccagccaacaatcatttattacactgagtctaacccatggccagacaccatggaaaaacagtgaaaaagagaatccttggccctaaaggatttacagcagagaaagacctacatgagcaggtccaatactgttttcaaaacacaaatttgaggccggccccagtggctcacgcctttaatcccagcactttggaaggccgaggcgagtggatcacttgagcccaggagttcaagacctgcctgggcaacatggcgaaatcccatctctattaaaaatacgaaaattagctgtgcatgttggtgcaggcctataatcccagctactcgggaggttgaggcatgagaatctcttgaacctgggaggcagaggttgcagtgagctgagatcgcgccatgcactccagcctgggcaacagaacaagactctatgtctccaaaaaaaaaagaaagcttgagattacataaactcagaaatgaacctatgccacatagcactgattttcaagttttttctaaagtgtaggaatattttcttcttaaagaaatgttgcagctgggcacggtggctcacacctgtaatcccagcactttgggaggccgaggcaggtggatcacctgaggccaggagtttgagaccagcctggccaacgtgacgaaagcccatctctactaaaaatacaaaaattagctgggcatggtggtgcatgcctgtaatcccagctacttgggaggctgaggcaggagaatcacttgaacccgggaggcagaggttgcagtgagccaagatcgcaccactgcactccagcctaggtgacagaacgagactccatctcaaaaaaagaaaaaaaaagaaatgttgcttaaaatttccaaaatagggatgaaagacccagaacttccctgatccactttcccccttcccttatgagtcatgtttctttctttataaggttcttagaaacacagtttgaaaaccactatactctaaaaatcctaatagttttgcctatcagaagtaggtctttaatctaccttgaatgggcttttgtatatggtataaagtagggctccaatttcaattttttccatatggacatctaacaggcctagcaccacccaagttcttcctttcccctacaagctgtaggggcacttctataaaaatatcaagtttctggatacatgtgggaccaaattagggttctctatacttttatatgagtctatcactgtgctaacctcagtctgtcttaattactctatatttacacacaataaatccgtatatttggtggatcaaatctctcaccttgacctgcttcttcaaaagcatcctggctatccttagtcctttgcatttccatatatattttagataagataggtaattttgagctctgcatgtccaggcaaccagtaaaataaccacaaaataaacctagatcagtgattctcaaccaggccaattttaacaccaccacttctcatcccaggcatactgggcaatgtctggagacatttttcgttgtcacaaaaagagcagaggtggaaatactactagcatccagtgcataaaggccagaagtattgctaaacatctcacaagggagagctcctacaacaaagagttatcccactcaaaatgttaatagtgccactgtggagaaactctgtcccaaataaatacggggcaaactgacatgggcctattaagagggtagggaatgtccacccaaaatgatcatttagttttagaaaactgaactgccatgtgccaaataagggtaaccccaattcataaaaataaaaatcatattatcatcacatacaaaaaggcttatcttcctggtcttgatagcaagggagtttgaaggaagttcatcaaaggggtaaaatctttaagatacaaagttaaaaagaaagaagatatctcccgattatgtttttttaaaatcttcaagaaacctaagaaatacccaatagaaaaatggaggctgggcacggtggctcacacttgtaattcaagcactttgggaggctgaggcgagtgatcatttgaggtcaggagttagagatcagcctggccaacatggtgaaaccccatttctactaaaaatacaaaaatcagccgggcgtggtggcaggtgcctgtaatcccagctactcaggaggttgaagcaggagaattgcttgagcctgggagctggccagtgcagtgagttgagatcgcaccactgcactctagcctgagcgacagagtgagaccccacctcaaataaaaaacaaaagaaaaatggcaaacaacttgattaggcaattcactaaagagggtatccaaatgaccaataaacatatgaagtcaccagagaaatactaactaaaacccaatgagaataccacacatacacaagaatgactaactttttttttaaactataaatatcaagtactaacaaaaatggtgaacaactttcatatactgctgcaggggttggagggatctgaccggggacgcataaattgattcaaccactttagaaaatgttgtcagtatctactatagctgaacatatgtatatactatgaccaggtatgtgtctacagacaatacttacctatttgcaccctttgaacaagaatgttcataacagcactattaaacaatactgaaaacaacccaatgcctaacaactgtagaacagattaataaactgtggtatattcatacaaggaaataatacacagaaacaagaagtactactatatgcaacagcatgaatgaatctcacaaatacaatattaagcagaagacagacacaagattacatatataattccattttttttttttgagatggagtttcactctatttctgtaaaaaggcaaaactcatcaatggtcacaggaggacaagaattacctatggaaagaagggacagtgactgaaaaagaagatgaggagggcctctggggtgttggtaatgtctctctcttttttttttaatctatgtagtagttatgacagtgaaaattcatcaagttatatacttaggatttgcatttttctatatttaggttacagattaaaggatttacttacaaatataaagagcgtatcagaatacaaccttgatttttcccatttagactattctaaataacactgactcacagtaatgtcaaaatcaagttgtgtacatatggataactcattgttgataaagacacaaaggcaatgtagtggataaaggatagccttttcgatatatccaggtgctgaacaactggatatccacatgcaaaaaaatgaacttgaatccataccttacaccatatacacatattaactcaaaatggatcttagacctaaatgtaaacctaaaattctatctgatcaaagacttgtattcaaaatgtttaaagaagtctcaaaatttaacagtaagaacacaaactaataaaaaataggcaattattcgaacagacatatcatcaaacaagatacatggatagctaataagaacatgaaaatatgggaaataaaaattaaaaccacaatgagatactgccacatgcctattagagtagctaaaattaaggccaggtatggtggctcatgcctataatcccagtgctttgggaggccgaagaaggcagatcacttgagcccaggggttcaagacaagcctggggaacacagtaaaaccaacaaaaactataaaaattagctaggtgtggtggtgcatgccagtagtctcaactactagggagtgtgaagtgtgaggatcacttggttccaggaggcaggggttgcaatgagccaagtgagccaagatcacagtactgtacccagcctgggcaacagaatgaaaccctatctccaggaaaaaagaatggctaaaattaaaaggactgaccataccaagggttcacaaggatgtgaagaaactggaactctcataactgctgatgggaatataaaatggtatgaccacttcatgaaacagtttagaaatttcttaaaaagttggccaggcacggtggctcacgcctgtaatcctaacactttgtgaggcacagatgggtggatcacttgacgtcaggagctacagagcagcctgaccaacgtggtgaaaccccatctctactaaaaatacaaaaattagccaggtgtggtggcacattcctgtaatcctagctacttgggaggctgaggcaggagaatcacttgaacccgagaggcagaggttgcagtgagctgagattgcgccactgcactccagcctgggcaagagtgactccgtctcaaaaaaaaaaaaaaaaaaaaaagttaaaacatacacacctacaaagcaatctggtcattctgctcctagtattcacccaagagaaatgaaaacatacatccatacaaagatgtagacacaaatgttcacagtatctgtctttgtaatagcccagaactagcaataacccaaatatacataaacagccaataaccaatttgtggtatatccatgcacaattactcagaaataaaaagaaacaaactattaatacatgcaacaacatagaggaatctcaaaataattgtcataagtgaaagaagccagacaaaataagtatacatcctgtatgaatccatttatataaactatagaaaatgcaaactaatctatagtaacaaaaatcagacaggtggttggttggggaggtgagtcatgtaggggtgggaaagagggataacaaaagtccatgagaaaactttttgggaaagtgagcatgtttaaaaagttttggataaagtgaatatggggttggtgtgtatgttcactgtcttgattctggtgaaagtttcatggaggtacatatgtcaaaatgtatcaaagtgtaccatttaggctgggcgtggtcgctcacgcctataatcccaggactctgggaggccgaggcaggtgagtaacttgaggtcaggagttcgagaccagcctggccaacatggtaaaatcctgtccctactaaaaatacaaaaaattagctgggtgtggtggcaggcgcctgtcatcccaattacttgggaggctgaggcaggataattgctcgaacccaggaggtgaaggttgcagtgggccaaggtcacaccactgcactccagcctgggcaacagagtgagattctgtctcaaaaaaaaaaaaaaaaaaagtaccatttaaatatatgcaatttgttatgtcaagtaaacgtcaataaagctgtttttaaaaggttgtatataaatattatacaccagaattcctataattagctgaaaattaatcccattcattcctaacaacaaatatttatctagcacctaccatatgccaggcaccctgctagagttctagggatacaatggtaagcaaattgacaatattcctaacctcatgaagtagtctgccaaggaagcagagattaataaaagatttagacagacacatataatacaaactgtaacaagtgctataaaggaaaggtacacaaggagaagacagactataataggaaaatcaaatctactctgacagaaaaatcagtgatggataccccaaggaagtcacatgtaaactgaggaagaaaaggataataaattgaagatggaactttgctcagaagagacactaatagaagcaaaggctctgaggaaggagaaagcataaatctttgaaggaaagggaagaaatccaaaaggccaaaatcaaaacaatgtagacaacactattggtcacctatttaataactgttccacttctctttcctcattcctaccagaagttcaatcatctaccctcctctatatagtcacatgctttagaggaagctgactccatccttgattttaggaaatggatactctttgttttgacttaagtcaatcatggcaacctctgtctccctgccagtgactggtaaaggaatagcatgagtaaaagcagaaaaaagcgttattggatgctctaaacaagaaatggtagtttggactatggaggtaccaatggatatggagatgtacatgaagaaataagaaagagcaaagtgtccaggatgttccctaggtttcttaggtaaataatagtctatcctttctatacagccaaaagcaggtgaaatattttttaaatatattattaataatcttatgttactcttaatgtatttctctaaaattagtaaaaattatttaaagatcacacataaacatacctgatacttatgtaggatactggcctcagaaggccaggcaaacttatcaagaatgaatcaatgaggctaattagatttcgtcttaggatacaaacattgttttatagaattctaacatataattaacaataatggctacaaataacatcaattttggaaaatcatttattttgccttgccttccttaaaaaattatttaggacaacaaaatgtctcaataaattaaaagtcaaaccaagaatttaaaaacgtctatggatttttgaccactctgtgctattttaaaatcattccagagaaactagatagagatatataatcagttatgctaaccaaacttatataaattagggcttataacagtaataattaagactcttattacagatatcaactgacccaggcaaaatataaattaccttgacaagttgatgaagtgccatttctttcagaaggtggtgtgcttggatagttgaaatgacgtgaagttccttggttcatgtcattgtttgtaaaatcctttgaatggcatgcacaacaacatgacaattgtacttcagctttttcacttacgccctcatctgctggtttccctaaaaatgaaagaacatctatttataatatatctaattaaataaacatcaatcattctctacagcccagttcacccaggattgggaggtttcctaagataaaagatttttagggctaacaccaggaaggtacctggcaaacctggacaagctggtcactttatctgcagcatcaaattaggacaggagagaaataagccaaaaacatttggttggacacagtggctcacgcctgttatcctagcactttgggaggccgaggcaggcacatcaattgaagtcaggagtttgagaccagcctggccaatatggtaaaaccctgtctctactaaaaatacaaaaattagccaggcgtggtagtgcacgcctgtaataccacctactcaggaggctgaggcaggagaatcgcttgaacctgggaggcagaggtagcaatgagcagaggtcatgccactgcactccagcctaggcgacagagcaagactctgtttcaaaaaccaaaacaaaaacatttatagggaaattatcacccatttatgtaatctgtaaaaatctaataatctaagattaataatgtaataaaagtacaactactcaagtattcatttatattaagatttatctaaaattcaagaatggattgaaacaaggacataaagtatatccttaattactactctttccctaaatgaagaatttgaaagttcaatatattagataataatctaacacataagggttaaatcattcccccaattatacttctatttcaaatagaaacatgttttttgatgtattaattctgatacttgcatcaaaatacattttaaggtcaatattcaaatcaataaaataggtaattttagtgctaaatataataccaaattgtaataagtttacattgtgtgcctacattgtatacaaatgtacaattcatatacccccaaaaaagctaaataatttatttttaaaaataatcagtattgacattgttttcccatttgtaccatataaatattcctaattctattttccagacatctgccattaagacctgaagttagtaccgataaactcatttttcccaaaattaacgtcagtgagaatcaaaatgaacaaccaaaagcttatgaagtatttactgtttttttttttttttgagacagagtttcgctcctgttgcccaggctgaagtgcaatggcgcgatctcggctcactgcaacctccacctcccaggttcaagtgattctcctgtctcagcctctcgagtagctgggattacaggcacacgccacctcaccaggctaattttgtatttttagtagagacggggtttctccacgttggtctggctggtctcaaacttccaacctcaggtgatccacctgccttggcctcccaaagtgctgggattacaggcgtgcgccactgtgcccagccttaatatactcttattagtaacaaacatttcattttaaaaatgtatctatatacctatatacacatacatacatacatacacataccatgtttaacctcaattctcctaatactttaggttaaagccatctaatgtaactaaaatgtatccaatattatatttctgattcattatgtagtttatatagtctttcatagaagtaaatattaataggcatttgttagcaaacaaagtaaaaatagtttggcctggtggctcatgcctataatcccaactatttaagaggctgaagcaggagaatcacttgagcctgggagtttgaggttacagtgagctatgatcacatcactatgctccatcccaggtgacgccactcaaaaaaaaaaaaaaaaaaaggaaaagtagtgggaagtaatataaattcatacaaacaatattatactaaatttctgtttatctggcatttaaacaagtagaaagatcaactagaatgtattcttttttatatattccatgtgctgatgttatgagaaaggaacaggtaagcaaatatattaaaggatttccccccccaaaaaaagcaattagtatgtgttacagcatcatgacagcccatctcttgcatcttttacatacaaattatcatctaattatttttataataactctaagcatccaaaactttgtttgtttgttttctttcacccaggctggagtgcacaatcacagctctctgcaacctcgacctcctgggctcaagcgatcctaccacctcagtctcccaagtagctgggactacaagtgtacatcaccatgcctggctaattgattgtcaatttttgtagagatggggtatcaccatgctgcccaggctgccaagtctttatgtactttccgactcatcaaaagactaaattatgttcaatactattttagcattaattaaacatattttgctatattgaaactcttttggaagatttataacttatttcaaagaaacatctttaaacaaatatttaagttagcgacagcatggctgaaccagtctggataaagaatactgtattatattttctcagatcccagtaagtaacctgaagatatcaagcaactacttaccactaagagattgttgccatgctaaagcagaacaaagtaaggctaagctttttccacttcctgtgggactctccaacaaacaatgttgcttgctgtttaatcctctgagaatctatgaacacagaaaccaatgaaaataataaacatattaactttataaaggtctctctccatctgaagtttaaatagaacagcaaggaaaagtgagattgcactccagggaacacaacaatagcagaaggaactcatatttagttaaatccaaactgtattcctttacacctctccctaagattatcttactaaaatatcaagcacaagagaagaaatgaaaagaggaatctgtgccagaattatgcaagcatcaatgatttctgtaaaaccagaatacattactacctatcaatatatttgatgaaaacttaatgaaggatactgctagtgagagtacaaattgttacaactacttggtagagaaataaacaatttcttataaagtgaagatgcccagctccagcaagtccagttctatgtgtacacccaaaacctttcccacatgaacacaaggaaacatgcataagaaagttcacagcagcagccacgcttgtaatcccatcactttgggaggccaaggcaggtggatcatttgaggtcaggagttcgagaccagcctggccaacacggtgaaaacccgtctctactaaaaatccaaaaattagctgggcgtggtggcgcatccctgtaatcccagctactggggaggctgaggcaggagaatagcttcagcctgggaggcaggggttgcagtgagccaagatcgcgccactgcactccaatctgggcgacagagtgagacgctgtctcaaaaacaaaaagaaaaaaggaagttcacagcagcattgtttgtaactgcaaaagaatgtaaacaacctaaatgtctaccaataagaaaatggacagataaattctggtatattcatccaatggaatttatacaacaattaaaatggattaagaatcaacagggctatacattaaaaataatgctaagttaaaaaactcaagttctgcataaaaagtaaggtaccgtatcacatcaatgcacagtttcaaatatgtaaaataatattctatattgtttatggatacatatatatgtaataaaagtataaaaacatggctaggaaaggaaaagaacaaattcaggatactaataatcttgttaccagtaaataagatatgaagtacatatggcaaaatagctgtaacaaaactggaaagctggtttactcaaatttgtatattaattttctacatgatccaaacaaaacaatggtgagaaaaatagtattctgtgtaaaagatagtaaatactctgtttttacttaaaagtatagcagtttttcattaaaagtatagaaattccaaatgagctgagaacatttttcagaatgttcttctttgccttaaccacagatatatacagtttagctgcaatcagtagtttcccagaggttagatattcttccaagtgaacccagaaaatattctccatttactgagaatatgaatgcagtcaaatactcaatgtactttatgggtcataagtatctatatcttaataaaaacttaactgctgaaaaatacttacagaattcatcatagcaagctgtgacgggtaagctttataaggaaagtaaatcttcaccccaccaattgtatattcagaccacattgaagacatagtgctttcctgtttatttcagattcctaactacaacagaaatgaaaatgtcaaatattgagacacgccttacaaagaaaaccagagaaccaaaactaagggagaaatctggaaacagaaactggaattaataaaagtataaacaaaacaaatggaaacaaaataatttcctagtcttataaatcacagcggtcaagagcatgtcttagagtctaacaaatctagatttgtatccttcactctgccaggtattagttgtgtgacttcgggaaagttagttaccttctctaagccacagtgactgcatgtaccccataggattgtggtaatgattaagtgaaataatgtgcaaatatgataaagtacataccagattaaacatgagctcttgtaacagttagatcagatgtaatcaacctacagaaacaaataagttcctgaggcctctctctctacaactccgtagcatcactctttctccagttcttcccctttgtgttacccctttctgcagtcctccagttagaagaaaaaagctgttgaccagaagtcaggaagcataggttctataccaggttttggtatactgcctggtatgttatctttgactcaggtatgttatctttgacatatctttttacttctctagtctaagatccttacctgtgataacccctaatttaatttaaaggctgttataagaaagagaatgccttggcacatagtaggcactcaaaaatgttatttgaagatcagtagagtattatagaaacaggatgggctttggagtaaggcaatcctaagtttgaattccactgtgtgaatcacttaacttctcagagcttgtttctccatatatggaattgaaatactactacttacctgacagggtttttatgaaaattagccagggcagaatgtacctaacccaggatctgatacagatgaggatcactttaatcctcacctcttctaaaccacttttcttaacctaggatccacggatgtaattcagagacaatgacctcttgaaattgcaagcataagtttctgtacatgattgcatttttctgaagaaaaagtccatagatttctcttcccgtaaatatatctcaaggaaatcaaaatagcgggggaaattacatgcactgttattaaataaggaattatttgcagtcgtgggaaaaaattgtaaattcaacctggggacgaagagatggttaaaatagcaattcaatagattatgaagccaataataacattcaccactgcttgtgtgctccaaaagaagaaccattattctagggtattttccagctctaacattttgcgattctatctgtaaagctctgagaatgaggtatggtggaatctaacctcttaatatgaatcaacaactcaacgctggcctagttactcagatataatctagaaatcagcccgtcctgtaccccggctgtggcaacaatagtgtcaaaatggggtagcttcccccaaacattgcataaaggataaacacacccctctgcctcccgccaagaattaacgcagcgcccgggctaagaacaggcctgcgctcaaaggaggtaaggataggctccctcctcaggttttctgccccgtatctccctcctcccccagccagttgagatccccgagaccctggtgatccagtcaccacccatgggcccgcaggctgtgcagaagaactcaagccctttccgtggacttccctccgacttgcctgtctggagggaaaccgaagcaacgctctgagctccgattcactgaagaaaaggaaaggaaaccgacttctgagagcaaataaagcggagccctggaagagaagaaagggcacgagcccttcctcctccctcttcctgggggtgctgctacttccccggccttgtgtgcaggactggggccgccgttacctttcctcgacccaccagacccctcaaccacacaacccgagacgaattcccgcct

SEQ ID NO: 38 - DNA, 38146 bp, Homo sapiens
  source 1..38146: mol_type = genomic DNA; note = HGNC Approved Gene Symbol: PALB2; note = Cytogenetic location: 16p12.2; note = Genomic coordinates (GRCh38): 16:23,603,165-23,641,310
tgtataaaaataaatatttattgccatttgaagctttatgtacacctttaaaagcacatgtacaaatgtgggaaattacaaaaatcaacctaaaaccctttttctcaaagtatacataaatgtacatccaagatcagtggtgctaccatcattagaataaaaaataagtctgtctggacataaacaagcaatcattttaagtgtcattcagatattctcctttatatttaaaactccaaaaaatactaagaggcccaatatatccagaaaattgtgttttcactttaccctaacttatgaatagtggtatacaaatatatttccatctttttgtccagccagcaaatgagagtctgtacccgaccatttcacaaaagaccaatgttggtcagagacaggtgggaggagggcagtacactgaccgagaagtaagtcccaaatggcaattgttccagaagtcaagattgctgctgcacagtgatctttcacgtcaccttccaggaacctgatagcatacaaagaagatataattcagattacatatccaaaaaacaattaaaaaaaaaaaaaaggtcaaaaccatgttcccaaaaccagcaacaggaacaaaaatccctgtaactatgaatgcctacatttgtagccttagaggtctgttggctattgtgttgcagttttggacagaatcacatgtccagttcctgccaatctctctgatgcatcttgtagcaattgaaggctggcgcacagtggccttccttccactctccatcactctggccaaactcagtcccaactcagtgtcactgctcttgccattctttctccctgacaggctctcaccccagctcttagcatggctgagttcttgtcatcattcaggcctgttatgtccatagaaaggtcacccctaatcctctatctcaggcagtgtgcacacacatacgggatctgttccatctttatgacatatatgtttttatcttcattgcacttttcactatttgagattaccctgtttccatattcagtgggaatttcccccacaaaagatgccatctatgaagcagaaacctacctggttgcctttttcatttagacaagggctctgcagtcagctacctgggtttaaattctaactctacaaagtaagagctgtgcaaccctgggcaaattatttaactttatcagtacaatagggatgattttaagagcacatacttgacaggactgtggtgaggttaaatgaaacagttcctataaaaggcttagcgcagtgcctggcacacaggaggtgctcaataaaaattagctattattagccgggtgtggtggctcacgcctgtaatcccagcactttgggaggccaaggcgggtggatcacctgaggttgggagtttgagaccagcctggccaacatggagaaacccggtctctactaaaaatacaaaattagccaggcgtggtggcacatgcctgtaatcccagctactcgggaggctgaagcacaagaattgcttgaacatgggaggtggaggttgcagtgagccaagatcgtgccactgcactccaacctgggcgataaagtgagaccctgtctccaaaaaaaaaaattagctgttattgtggccaggcctggtggctcacgccggtaatcccagaactttgggaggccaaggcaggcagatcacctgaggtaaggagttcacgactagcctggccaacatggtgaaaccccgtctctactaaaaatacaaaaattagctgggcatggtggcacgtgcctgtaatcccagctactaggggggctgaggcaagaggatcgcttgaacctgggaggcagaggttgcagtgagctgagatcatgccactgcactccagcctgggcaacagagagaaactccgtctcaaaaaaaaaattagctattattattattcactgctgtatcactggtgcctgaggcatggccagctctccaaagagtattatatgaatgaactgcatgatactttttatccctggttcccacccaactttgcgtacctaactcctaacttatctttggaaactccctaaggttttctttgacagtctctccccaaccctctactgccaattaaggtgcccacctctccactcttgtgctctcaaacagtgcaagcttcatgtattgtattttgtgcactgaacaacagtcactagttttcccttctaatttccataaaattagaaataagtggtttgtttgtttgtttgtttttgagacagagccttgctctgtcacccaggctgaagtgcaatggcgagatctcagctcactgcaacctctgcctcccagtttcaagtgactctcctgtctcagcctccccaatagctgggattactggtgcacaccatcgcacccagctcatttttgtatttttagtggagacagggtttcaccatgttggccaggctggtcgcgaactcctgacctcaagtgatctgcccgcctcggcttcccaaagtgctgggattacaggcatgagccaccgcgcccggccagaaatagcagtgttttgctatggtctgaatgcttgtgtcctcccaagattaatctgttgaaacctaatcaccaatgtgatggtattaggaggtggggcttttgagaagtgattggtggttttgtaaaacaggccccagaaagctgccttctaccatgtgaggacacatctatgagccaggaaatgggctctcaccagacagtgaatccgccagcaccttgatcttggacttcccagccaaaagaatggtaagaaatacactttgttgtttaaaggctacccagtctgtggtattttgttgtagcagcctaatagaactaagatatgcttcctacaggattggtaccaaacaggctttcaaggattcctgaacagatgagtttgaaaagtgacaaaggaaatgcttgaccaagcagttatctttatctttaatctctagggccaacgactatcgttctctcttcaaatccaaggaagcaagttttatatgaaagcacatactgcagatgatagttctgaggttcttaggttcttaaaaaaaaaaaaaattagccaagcgtggtggcatgtacctgtagtcccagctacttgggaagctgagatgggaagatggtgtgaacccgggaggcagagttgcagtgagctgagatcgtgccactgcactccagcctgggcaacaaagcaagaccctgcagaagtgtcacagctagctaagtgcatagggatagagaatgtcttttagaacatgcacttatcaaataaactttgcataaggtccaaaaaaacatgtattgtaactgtgtgcattatccttgtgagttattaaagtcagaccttgttttcttgattcacttcagcccaggctgcagtgcagtggtacaatctcggctcactgcaacctctccctcccgggttcaagcgattatcctgcctcagcctcctgagtagctgggattacaggcacgcactaccatgcccagctaatttttgtatgttagtagagacggggtttcaccgtgttggtcaggctggtctcgaactcctgacctcatgatccgcctgcctcggcctcccaaagtgctgggattacaggcgtgagccactgcaccctgcttttttttttttttttttgagacggagtctcgctctgtctcccaggctagagtgcagtggcacgatctcggctcactgcaacctctgcctcccaggttcaagtgaccccagcctcccgagtagctgggattataggtgcctgccaccgtgcccagctaatttttgtatttttagtagagatggggtttcaccatcttggccaggctggtgaactcctgacctcatgatgcacctgcctcagcctcccaattgctgggattataggcgtgagccactgcctggccagataaatacttatctatagataaatataaactgcctgcatgatagaggctcagtcaaactcagtcagatttcaaagtaaagatgtcttcctaaagtaccttaaattttccttaatttaggtttagggaaagaacacaaattatgttttttaaatacagaacgttcattactctttatgtgaatttttttttttttttttttgagacagggtcttgctctgttgccaggcttgagtgaagtggtatgatttcagctcactgcagcctccacctcccaggttcaagccatcctcccacctcagcctcccgagtagctggaagtacagatgcatgccagcatgtttggctaatatatatatatattttttttggtagagactgggtcttgctctgttgtccaagttggtctcaaactcctgggctcaagctctcctcccaccttgacctcccaaagtgctgggattacaggcatgatccaccatgtgctgccaaaatatttaccttaggggaaaaaacagggcttgaataaacactattaaaaacctatataaccccatactagtagagatcaggatgcagggaatctggggtttgactcaagtccactaatcttcatcctacttctgaatattcctatcatgatatatagtatttcatgttttccattcttctaagtgacacaaaaatatctagtttttgtgtttgcacagtgcctttcagaatgtcccacccatagagtagcagttatgcacacttgcctgccagcctgccctggaggaagacagtacagcatcacacccacgctgagagtcgtcttagggttaatcacaatgagctgaaacacagggcttcgcaacgactcactctctttggcacagggatgactcaggacaataaagagaagcccctaatttcggagaaaaataaatatcccaaatagactgtcaagagtatgtcaggaaaaataaagatctggcagagacaaaaaccaaacaattaaagcaatgaccgataggctctgaagtatccaggatttaaccactggcttgatttttttccctgccgtctaggaactgttgagattattactggactggacttctggcttcttgttcttcttctttttttttttagagacaaggccttcctgtgttacccaggctgttgttgaacacctggcctcaagggatcctcccacctcagcctcccaaagtgttgggattacagacgtcagccaccgcgctcagccaacttctagctttagcttctcctgcttccggttcccagtgtttgttttagccagtcttgccaggcatgaatctgattcatccatttccttccccttagatagtactacatttcatgccattcatttggggaaatattggcaaagagagaatgaggacacacatgtgcagggagtgctcaaattagaaatattcatttgtaaattggtttttgaacattcagaacatgttttcccataaaaacaatcttgtacatggtggctggtttctcagaccagcccacaatagcctatttaaaaccctgaccctactactctctatgaataagggtgaccaaaaaaagataccatcacctatggctgtttctgtgagaaaatgtgttaaagttctctcctggctttaaaattacaggctctaataataatattactgtatgtgtgtatatatatacacacacacacacacacacacatatatacagattttttttttttgagacggagtttcgctcgttgcccaggctggagtgcaatggtgcgatctcagctcactgcaacctccgcctcccaggttcaagtgattctcctgcctcagcctcccaagtagctgggattacaggtatgcgccaccatgcctggctaatttttgtatttttagtagagacagggtttcaccacgttgaccaggatggtctcgatctcctgaccttgtgatccacccacctcagcctcccaaagggccgggattataggcgtgagccacggcgtcaggtcaaatgattgaatttattaatgaaaataaaatatttttatatttagaaaacaactgaggtaactcaggaggccgaggcagtaggatagcttgagacaagcctgggaaacacagctgaagacctcatcatctaaaaaaattaaattaaaatttagctgggtgctgtggctcatgccatgtaatcccatcaacttggcaggctgagtggggaggatcgcttgagcccaagaactcaaggctatagtgagctatgatggtgccactgatctacagcctgaatgagagagtgagaccctatctctaaaagggaaaaaaactgaggatttaaaaatgttaaatgctatacagttaagaagaggctgacaaactatggcccaccaggtaaatctaacccaacacaatttttttttttgagacagagtcttgcactgtcgcccaggctggcgtgcagtggtgcgatgtctgctcactgcaagctctgcctcctgggttcacgccattctcctgcctcagcctcccgagtagctggaactacaggcgcccgccaccacgcccggctaattttttgtacttttagtagagcggggtttcactgtgttagccaggatggtctcgatctcctgacctcatgatccgcccgccttagcctcccaaagtgctgggattacaggcgtgagccaccgcgcctggccacccaacactttttttggggggatagggtctcactgtcacctaggctggagtgcagtggcataatcagctcactgcagccttgaattcctggcctcaagcaatcctccctccttggcctcccaaagcactggaattacagctgtgagccaccatgcctggccccagtgcttatttttccatggctaataaactaagaatgtttttcagattttgaaatggctgaaaaacatcagaaaaataacattttgtgacatgccaaaattaacatatgaagttcaagtttcagtctccataaagttttattagaacacagctacatctatccatttgcatacagtctatggctgatttggggccacaatggcagagttgagtatgtaaaacagagattgtaaggccagcacagctgaaagtatttgccgtctggtcatatatggaaaaagtttatcaatccctgcactaaacagttaaataaataatacaatgttatttcttttttttttttttttttgagacagagacttgctttttcgccaggctggagtgcagtggcaggatgtcgtctcactgcaacctctgcctcctggattcaagcaattctccttcctcagcctcccaactaactgggactacaggtgcgcaccaccatgcccagctaatttttgtatttttaggagagacggagtttcaccatgttggccaggatggtctcaatctcctgacctcgtgatctgcccgcctcggcctcacaaagtgctgggattacaggtgtgagccaccacgcctggcattaaatattatttctgaagattggctttatgggggacttttacttactatcttacacatgtctgtgtgaaatgttttaatatcaagtgggtattgatgttgtaatataaaaggtataacattatttaaatgcttaataagtaaattctaggccaggcatggtggcttacgcctgtaatcccagcattttgggagcgtgaggcgggtggatcacaaagtcaggagctcaagaccagcctggccaacttggtgaaaccccgtctctactaaagatacaaaaaaattagccaggcatggcggcaggcacacctgtaatcccagctacttgggaggctgaggcacagaattgcttgaacctggcaggcggaggttgcagtgagccgacatcacaccactgtactccagcctgggtgacagagcaagaatcttgtctcaaaaaaaaagtaaattctagagatgaattcaactgtcagtctatctatctatctatctatctatctatctatctatctatctatcaatctatctattcgttgttgttgttgttcttttgttttgagacagagtcttcctctgtcgcccaggctagagtgcaatggcacgatcttggctcactgcaacctccacctccaggttgaagtgattctcctgcctcggcctcctgagtagctgggattataagcacctgccaccatgcccagctaatttttgtattttttagtagagacagggtttcatcatgttggtcaggctgggtcttgaactcctgacctcaggtgatccacctgcctcagcctcccaaagtgctgggattacaggcgtgagccaccatgcccagcctagttattattattattattatttttttttgagatggagttttgctcttgtcactcaggctggagtgcagtggcacactctcggctcactacaacctctgccccctgggttcaagcaattctcctgccttagcttccctagtagttgggactacaggcgcacacaccacacccatgtaaattttgtatttttagtagagacagggtttcaccatgttggccaggctggtcttgaattcccgacctcaggtgatccacccgccttggcctctcaaagtgttgagattacaggcgtgagccactgcacctggactattagttatttttgggacagggtctcactctatcgcccaggctggagtacagtggtgccatcatggctcactgcagcctggaacacctgggctccagtgatcctctcactggagaagctggtattacaggcatgtgccactacacctggccacaactgtcttatttaaaggaggacaaaggttaggctcaagattatgtgttggattatataacatcacacaacttttaaattcaattccacagatcctactaggctagggaaagatgcggtctttgtgttcagagcctctggatgctgatcctctcactgtaatcaccaggcaagtcagtctctacacaaatgctgagcctgctgccattgtctctgctcatggcttcaacagtgaatactcaagtagttattcattactcctagacaactactttcccactgtaactagattgtgagtcaaggctttttatttatttatttatttattttgagacagagtcttgctctgtcacccagggtgcagtggcacgatctcggctcactgcaacctccacctcctgggttcaagcaattcttcctgcctcagcctcctgagtagctgggattacaggtgcctgacatgacatctggctaatttttgtagttttagtagagacggggttttaccatgttggccaggctggtctcgaactactgacctcacatgatacacccacatcggcctcccaaagtgctgggattataggtgtgagccaccatgccaggccaagactttttttttttttttttttttgagacaggttcccactctgttgcccaggctggagtacagcagtgtgatcatggcttaccacagcctcgacctcctgggctccagggatcccctgaactcagcctcctgagtagctgggactacagctgcatgccaccatgcctggctaatttttgtctttttttatagtgatggggttttgccacattgcccaaggtaaaactttttttttttctttttgttttttgagacggagtctcgctctgtcgcccaggctggagtgcaatcgtgcaatctcggctcactgcaacctccgcctcctgggttcaagcaattctctttcctcagtctcccaagtagctgggattacaggcatgcgccaccacgcccacctaatttttgtatttttagtagaggtgggctttcaccatattggtcaggctggtctcaaactccttacctcaggtgttccacccactttggcctcccaaagcgtttttttttttttattaatacaaaatattttatatatttatggggtacatgtatttgttatgtgcacaaagtatataatgatcaaggcggggtatttggggtacccatcacctcgagaatctatcatttctatgtattgggaacatttcaagtcctttcttctagctactttgaaatatatagcacattgttgctaactacagtcattctactctgctactgaatattggagcttatttctaactgtatgtttgtacccactagccaagactattagtgcaagagctgagtaactgtatttatttctgtgtgagaagactgaagcctaagagtaaagcatgttagctgggcactgtggctcacatctgtaataccagcactttgggaggctgaggcgggtggatcacctgaggtcaggagttcgagacaagcctggccaacatggcaaaaccccatctctactaaaaatacaaaaattagccgggtgtggtggcgggcacctgtaatcccagctacttggaagactgaggcaggacaattaattgaacctagaaggcagaggttgcagtgagctgagatcgcgccattgcactccagcctgggcaacaagagcaaaactccatcccaaaaaaaaaaaaaagtatttctgggattattggatcatttaatcatccttcctaaggctacttaaacatggcaatgtggctgggagtcaagtctgataacaggcataatagttctcagttcaaatccacagctagaaataaatatttgccctcaggtcctacagccagaaaatttaccaagcaatcactgtaccaacacttattttcatcctaaatttcaagaaaggacaaacattgctatccaattttgaaaaaagatgccacggggaaggtttgttcattactgcttatgacttactgctctcacttaatgagaccaacagtaacacacaaagtggtcccagccagtcattacttaccatttcagaataggctttgtgacagactgaagcttggtaagaatcatcaatgtgcatctttttcaggagttgaccagtttttaaattccttagataacaaaaataaataagctgatcacattcttccaacaaaccagttttcagaaaatattttcttattcatcatagcatgtcttaggaggtgaccagggaaaaaactaagagctccttagttttctttagtcatagatttaggtaaaagtagaactgtgggttaattttgccaatagtttcatttgatagttcagccttagattaaatctacaatgcccctagggataaatctctccaaattccatgaggaaggttccatcatctcattcaacctggtattgaaatcaggcacatggtatagcagtatcatgattttgtgacacttcttgttatgtctaaattttccatggaagacaacggccaggaaaccaaattttgtagggcaagagactacacctaaaagagagttacaattatatctctattacatgtatttatactacaactagaccaaaataatggatagaaggaaggattgaagtggggtaggaagagaggggtgaatataaagaagaaaaaagataaagtttgttggaatcacttcccagctttttttttttttttttttttttgagacggagtctcgctctgtggcccaggctggagtgcagtggcgggatctcggctcactgcaagctccgcctcccgggttcacgccattctcctgcctcagcctcccgagtagctgggactacaggcgcccgccactacgcccggctaattttttgtatttttagtagagacggggtttcaccgttttagccgggatggtcttgatctcctgacctcgtgatccgcccgcctcggcctcccaaagtgctgggattacaggcgtgagccaccgcgcctggccttttttttttttttttttgagatggagtctcgctctgtcacccaggctgagtgcagtggtgccatcttggctcactgcaatctgcacctcccaggttccagcaattcttccacctcagccttccaagtagctgggattacaggcacccaccaccatgcctggctaatttctgtatttttagtagaggcagggtttcaccaggttggccaggctggtcttgaactcctgaccgtaggtgatccacctgcctcggcctcccaaagtgctgggattacaggcacgagccactgcacctgacctgctccccagctttattgaggatttgtgacattgataactgctttgtcatgatactctatttttttgtttttggagcttagggtctcgctccattgcccaagctggagtgtggtggcgtgatcatgactcaccgtagccttgacctctgaggctcaagcgatcctcccacctcactgccccaagtagttgggactacagctgcatgccaccatgcctgaataattttttaattttttgtagagacagggtttcactatattgcccaggctggtcttgaactcctgggctcaagcaatcctcccacctcagcctcccaaagtgctgggattacaggtgtgagagactgcacctggttcatgttactctgttgatgaaaaactttcagttggctcccattagccacaacataaagtccaagttctttttttttttgagatggagttttgttcttgttgcctaggctggagtgcaatggcacagcctcggctcactgcaacctctgcctcccaggttcaagcaattctcctgcctcagcctcctgagtagcagggattacaggcaggcgccaccacacccagctaatttttgtatttttagtagacacggggtacaccatgtcggccaggctggtctcaaactcctgacctcaggtgatctacccgccttggcctcccaaagtgctggaattacaggcgtgagccaccgcgcccggtggtatttataactctcatgaatccagcagtgcaatatttacattatcactcattgctccatttcctgaaatctttctgcctgaagaacatatgcatttccttgactctagactttgctcaagctatgctttccaatgacccctgctcccccaactccctgccacccattacagaagagttcccatccctgttactgacgaattcccatccatttcttagggcctagttatatcccaccccctccaagctgcatgaactcacttgagactacagcagtccacagtcatctcctctcctttaattttgtccatatacctcatttggtatgcaatatactactggcaatactgtatcatgtattcactcaacaaatacagaattctatgggccagatactgtgtataaaaaactgaagaaggaaaattaaatttttatgtgcatatgcaaagttttcctcctatcagggacaccagatgggtgtcctacagagtttcatacatggtctgtatttagtaattgttctttcctcaaatcccaaatcactttgaccttatgtgaattgtaaaaaggattgtactgaaattgtaggctttgatggtaaaggcatcttatttacctactagattataggggccctgggaccaggattcatatctgattcatctctgcatctctcacagagaatgggacataagtagagacccagatacctactgaatgtttggaagatattaaatgaaatgtctcagtgaatatggacagcaagacttccttacacactggcccctcagtgtttaagaatgttttaacgtgtttctttgatatgacttcattgtaaacattaagcttaagaaatttttttttttttttgagacggagtctcattgtcgcccaggctggagtgcagtggcgtgatctccgctcactgcaagctccacctcccgggttcatgccattctcctgcctcagcctcccgagtagctgggactacaggcacccaccaccacgcctggcgaattttttgtatttttagtagagacggggttttaccgtgttagccaggatggactccatctcctgacctcatcgtgatctgcccacctcggcctcccaaagtgctgggattacaggcgtgagccaccgtgcccggccaagcttaagaaatatttagaccttcagcatagtttccaaaaaaagccacttgacacttgagtataacatgaatcacttgagacatctaacaaatcaggagttaaataagaacaaatactacatgtaagtataaaattatacagagcccaaaagataagtaacagcttttgacagacaatatgattaatacacctttgagtaactaccctaaacatggagctaaggcaggcaccaagaatagatatgagacatggtacctgtcttcaaaaacgagagaggataaataacacaaagcagcaaatactaaattaaaaatcaaggcaggccaggtgcggcagcttatgtctacaatcccagcactttgggaggctgaggcgggaggatcacttgcattgaggagttcacgaccagtctaggcaacatgggaagaccctgtctctacaaaaaaaaattaaaaaaaaaaaaatttttttttttttaattagtcaaggctggtggcatgcatctgtagtcctgctactcaggaggctgaggtgggaggactgcttgagcctgagaggttgagacttcagtgagccatagtcatgccactgtactccagcatgggcaacagactgagaccctctctcaaaaaagcaaaaacaaaaaaacaaccaaggcagtatgaattcggagaaggaaacatcaatgaaggctggaatagtacaacagaactcaaggtaactgtgggggtgaaaatatcccctaaggggaacttagaagccaagtatagaaatccctccccaacttcccagcactctagaaggccgaggtgggagggttgcttaagtccaaaagttcaagaccagcctggaaaaaatagcaagaccctgcctctacaaagaaaaagaaaaagaaaaattagccaggcatggtggtgtacatctgtggtctcggcactttgggaggctgaagtgggaggattgcttgtgccaaggagttcaagaccagcctgagtaacataccaagttctcatctctacaaaaaatttaaaaattagcagggcatgatgctgtgtgcctgcagtcccagctactcaggaggctgaggtgggaggattccttgagcccagaagtttgaggttgcagtgagctacctcaaaatgcagtgagtcatgcccatgcactccagcctgggtactgagtgagactctgtttcagaaagaaatcccttcccaatctcaaattcctttgtgacctcttatatacgaaatgccaaaggactacttatagaaaaagggtacaactgagagatgggaaggaaaaagggaggaaaggaggacggcagagctggagaggacatttttgtactagagcaccggggaaataaaagctgaaggaaagcaaacatgggcccctgtaaaggttttcttttgagggatgagggtagagttgaagaaagagtatttacaatgtagtcgaataaaaaatgacctgcgtttgagcccaggcattcgaggttgcagtgagctatggtcatgccagtgcactctagtttgggtgacagagtaagacatagtctaaaaaaatttaaaaaaaaaatatcaagtttgaatattgattaatggcaaggagatgaactactagattattttaacagttcaggagacagataatgaaggtgtggactatggaaatagcacaaagaatagaaaagacaacttctggaagagcaccatcctcaaataacacccctcggcagaaaccctggtgaaagtgctccaagtggccaagcgctaccctagacaacaggacatctgaaagcagggtcttctggcagatcagaacatagtcaaatttcagaggctttctggtgggaagggcacaacgtttctctcaagggccatacttttctagtttattcctagaaggttagggttgtaagtcaccatagtgtttaaaaaaaagaaaacaaaaaaaggttagggttggatggtacataagagctagggtagtggtcacactaatataacttcctcttaccaagacccactctggccctaaggaaacagttaatagacaaggcttctgagaaaagaaaaaacatcaatctattttcctaatacaaattaaacttgcaagtaagtgcctgtggctgggtatggttctccctatagtcagaaaagagatggctggggactcctgtgatggtttccctatcacaaatctgttaatttggttcctgtgatcacacttttttcttttctttttttgagacagagtctcactctgtcactcaggctagagtgcagtggcgcgatctcggctcactgcaacctctgcctcctaggttccagcgattctcctgccttagcctcgcaccaccaggcctggctaatttttgtgtctttagtagagacgaggtatctttagtagagatggggtatctttagtagagacgccacacttattttttgtatactgagtaactttggactgtatcctagttacagtgatattaatatgttgcaaaaactttgtattctgttaggttcctctgacaaacactgatgttttttctttttaaaaatattttttaaaaaggaattttaacatttactgaatacctcctatgtgccagacaatatggtaagtacttttaaaatacaattctattgacttttaaaaaattattatttttttttgagacagaatcttgctctgtcgcccaggctggagtgcagtggcgcaatcttgactcactgcaacctccgcctcctgggttcaagcgattctcctacctcagcctcctgagtagctggaattacaggtgtgcaccaccacgcctggctaatttttgtatttttagtagagctggggttttgccttgttggccaggctggtctcgaacacttggcctcaagtgatctgcctgccttggcctcccaaagtgctgggattataggcatgagccacccgtgcccggccctgatttttttggttgtaagtttgtctgtcctagtaaacagttaacttggctgaacttgaactccaaatgccgaaactgaaattcgttctttcagtcttacctgagctgctttcagtcttaccagactccaagcagtctgacctatgaatatgcagtttaaagggtcaatcaaatatttaggtaaacattatagctagaatttagggttcttttttttattttttgctctctcctttttaggacttttcccctccctttctagcagctgcgatcaccctgaactctgtcctttggttctctaagccagtgggacagaagatcttctattaggcttccagtcacccagtgagcagagtgggccttgccccctagcttaaagccataataggaatgttgcctagtgccattcccttcacctaaagggagaaacccctccagtatgtttcttctttttcttgttctctggtgcctttagaaagttgttttttgtattttttccagagtgtatacttattcgaaggtagacagttggtctgacagaaactactcaaccactaaccaaaagcagaaagaagtgtacatctttgaaaacagaattccatttagttttaaatagtctactcagactgatcttttttggttatgtctcaattaatatgatgttgttggtaagtcaagtatatagtatctgacaaaaaaaccacaatcaggccgggcgcagtggctcatgcctgtaatcccagcaatttgggaggccaaggcgggcagttcacttgaggccaggagttcaagaccaacctagccaacatggcaaaatcccttctctactaaaaaatacaaaaattagccaggcacggtggctcactcctgtaatccctgcattttgggagtctgaggcaggtggatcacttgaggccaggagttcaagaccaacctggccaacatgatgaaaccctatctctactaaaaaatacaaaaattagctgggtgtggtggcacatgcctataatcccagctactcgggaggctgaggcaggagaatcacttgaatccaggaggcagaggttgcagtgagccgagatcataccactgtactcccacctgggtgataggaggagactctgtctcaaaacacaacaaaaacaacaacaacagcaacacaaaaccacaatcatgtttacacatactctcttatttaatcttcacaacaaccctgtaaaattagaggtatatcctcatactacagatgagggaactgaggacctagagggaaagcttaccaaataacaatgttgttcataatagtagtaccaagcagagcttcttgcatcccttggacctcagcaaaagttagtatagtctcctcagggggcatcaaaaattggttttctttgcctctgtaattaaaacagtatgaaaagtcagtactttgcactaaagcagtctctaggtagcccttctccgcattgttgaactgcataatataaactaacctaatatcaggaaaaaaaaatctaacccagaaaacgtgtatactaaactttctacaatgaacatatattactttcataatatctacctagatatgctgcaagcacctcgaattcattatattcaaaattaaacttgttaactttttctataaaccttttgtttctttctgcattcctatctcaatgaattgcatcaccatctaatgtccaagtttcagggttggtcaccactcaagtgaccacctagactggggggaaggagacaaggataatacccacatttcgagcttggtcaccactcaagtgaccaaccctaccatgttgatattctctccttcctctcaatctagtcaatcaccaagtcccagtaattttatcttctcatctctcagaaatctgtctgcttcttcccatctccactaacatacccctaatttaagcaaacaattatcatctcttgcctagattactgcaacagatcatgaataaataagccaaagttccctgccctccatttttagaagatacatgaataataacaatgaaatgtaattgaaaaataaaaataaagtgtaatgagtatataatagagaagatgctgtaagttcagtttgcaacattttgaatttaaggtgtccccaatacgtctaataaataggcctgcaggtctagagctcaagaaagagctcagaggtagaaatgtatgtttgcaagtagtcagcaccaagatggtcagtgaagcaatggacacaagtgtgtggaacgaggaaagggtctaggaccttaaggtatttctatatttttaaaaatatttgtgtgtgtgtgtgtgtgtgtgtttaagattaggtctcgctctgctgcccaagatggagtgtggtggcgtgatcacagctcactgcacccttgaactcctgagctcaagtgatccttccacctcagactccctagtagctgggaccacaaggcatgctctgccacacccagctaatttttaaattttttgtaaagatggggccctgctatgtggccccaactggtcttgaactcctgggctcaaacttctgccttggcctcccaaagggctgggattatgggcatgagccactgtgcccagcagaggtatttctaacatttaagggacacacagatttcaagaagactgaagaacaaactacatttgctgagcctctcaccttctttgacttcatccctgacatgtctggcttccacctcactaacctgcttctatgtcataacctagtgttgatgcggtacatgcttatattacacccccagcacagaaaaacgagatcctagttacccaactttctctgaaacctgtgataaaatcattcttcatctaatagttaaaaatcaatcaatgcttttcttaccctccatcttctgcaaacgtcatgacttctacttgttgatcagaaagggtcccactgctactaactagcctcctctttgtcaggccaagcacagcttttatatttccagacttcagtagtacttgcttttcactttcatcatcagaggaacaaaacaatgccctaagccaaatataaggaaaaatggggtgatgtgaggagtaaccttttaatattaaaggactaggttcactttttttttttttttttttttgagacagagtcttgctctgtcgcctaggctggagtgcagtggcacaatcttggctcactgcaactctgcctcccaggttcaagcgactgtcctgcctcagcctcctgagtagctgggattataggtgcgcaccaccacacctggctaatttttctgtatttttgtagagacggggtttcaccatgttggtcaggctggtctcgaactcctgacctcgtgatccacctgcctcggcctcccaaagtgctgggattacaggtgtgagccaccatacccggccttttttttttttttttttttttttttttgagacaaagtctcactctgtcatccagaaggaatgcagtggtggcacgatcttagctcactgcaacctctgtttcccgggttcaggcaattctcctgcctcagcctcctgagtagctgggattataggcacccgcaggtgctatacaccaggctaatttttgtattttcagtagagacacagtttcaccatgttggccaggctggtctcaaactcctgacctcagttgatccaccttccttggcctcccaaagtgctgggattacaggcgtgagccactgcgcccagcctaggttcacattttaaatagaaacttcagtcagggatgtcattctattgatttttttttaaacaaatctctctctctttagatctttcagattctttcaagactcaagcctaggttattacctgcacttaaaaccagctgacagagacaaagatgaaggaaaaacaaatcactccttgggaattacatacctgatctctctgatttccaaatttcccaaagctacacacacgagattatacacatcaggcactggaactatctgtaatactggaacctaaataaaacaaagcagccaaaaattatgcttggttgtttcatttttgtttaatccagattttccaaaatttatcacattcttttgtattctcactgtacaaggataattttcatcatttgaaggctcagaaaactctttttattagctgtaaatctaaataaactatatgcataatagcataatagtgcttactgagcatttacctaatgcaaggtataattctaacaataggggaataattgggtatattttggcatgtgaatgtaaagaatatttatgcagccatttaaaagtatatctatgttcactgaacaaatatttattgggcacctctgtgtaaagcacagtgttagatgttgtatatatttggagagcaagaatgaggtatattcaagtatgaagactctacaggaacaaggaaatttttttttttgagtcggagtttcactcttgttgcccagccttgagtgcaatggcacaatctcagctcattgcaacttccacctcctgggttcaagcgattctcctgcctcagcctcctgagtagctgggattacaggcattcgccaccacacctggctaattttatttttaggagagacggggtttcaccatgttggtcaggctggtcttgaactcctgacctcaggtgatccacccacctcagcctctcaaagtgttgggattacaggcgtgagccacctcgcctggccagaaaaatgtttatatgtatggtgagaaaagacagatctaaaaattttaagcacactaagattgcaagcttgtaagatgtatatgatggtgggaaaagaccagaaggaaatacatgtagaaaagaagcaaaataatgccttggtgaagggcaaggagtacaaatatcagcaagtgtcaaagtcagaatagacataaaattctaagctcctccaacaggtctagtgtaaaaacccgtctctaggctgggtgtagagctcatgcctgtaaccccagcactttgggaagccgaggcgagtggatcacttgaggtcaggagttagagaccatcctggccaacatggtaaaaccccatctctactgaaaatacaaaaattagctgggcgtggtggtgggcgcctgtagtcccagctactcgggaggctgaggcaggagaattgcttgaacccgggaagcggagattgcagtaagccaagatcgccccactgcactccagcctgggcaacagagtatgactctctctccaaaaacaaacaaacaaacaaaaaacccatatctagataaacctgtgatgggctgggcatggtggttcacacctgtaatccccagcactctgggaggctgaggcaggcggatggcttaagcccaggagttcaagaccagcccaggcgacatggcaaaaccctgtctgcataaaaaatataggccaggtgtggtagctcacacctgtaatcccagcactttgcgaggctgaggcaggcggattgcctgaggtcaggagttcaagaacagcctgggcaacatggcaaaatcccgtctctactaaaaatacaaaaaaattagccaggcatggtggtgggcacctgtaatcccagctactcaggaggctgaggcacaagaatcccttgaacctgggcggcagaggttgacagtgagccgagatcatgccactgcactccagcctgggtgacagagcaggactccatctcaataaaaagaagaagaaaaaaatacaataaaaaattagccagacatggtggtgcatgcctgtggtcccagctacttgggagggtgaggtgagaggattactgagcctggggaggttgaaactgcagtgagccgtgatcatgccactgcactccagcctgcatgacagagtgagaccctgtctcaaacaaacaaacaaaaatttgtgataaagcgaacaaagcaggatgttaatggtagagtctagaatggtgggtatatgggtgctcactatacaacttttctggatgtttgaaacttttcataataaaatgttgggaaaaaaacctcatctctgttctgccttgcatggtcatagctcccaattttggtaagctgcccatctacattatcaggcaaatggctgcaaagatctctttcagctcgagattcccacttacctctgcgaagtgccaggtataaagtttttcccactgccaagcatccagagctttccaaagagaaactacatcttcgcaagcagttatgatacatggctctttacaaccggctctttcccaaaacatggcactcacatctacggaacaggaacctgaaggattctgacacaatggcaacagttctgttaaagtggcactcgagtgctgttttatgcaaagcataagtatgcaaagtgatgaattataattcaatgaaacagtaggtatgtaaaatttaagtcttatgcaggtgaaaagaaagagctttgtggttcttatgtacctaaaaaaatgcctatcaaacttacatcatgaaagattttattttttatttattttattaattttaatttttgggtgtttttgggactgagtctcactttatcacccaggctggagtgcagtggtgcaatctcggcttactgcaaccttcgcctcccgggttcaagcgattctcctgcctcagccttccgagtagctaggattacaggcgcccgccaccacacccagctaatttttgtatttttagtagagacaaggtttcaccatttggccaggctggtcttgaactcctgacctcaagtgatccacccacctcggcctcccaaagtgctggggttacaggcatgagccaccgtgcccggcccatgaaagattttaaaatgtatagtccagatggaataaattcagatataaccacaaaaaaaatcctgtagaacttatccatttgaaaattaaacatcctgatgaaccactcatgggctgaaaccacaggtttcaatgttattcctcggagggagtaacattgaaacaacatacattatactatctactattatgaccatgggagcactatgtatcaaaccacagagcgtggccaaagcagtatttccaagaaaatttggaaatttccaagaaaaatcataatcacggccgggcgcggtggctcacgcctgtaatcccagcactttgggaggccgaggcgggtggatcatgaggtcaggagatcgagaccatcctggctaacaaggtgaaaccccgtctctactaaaaatacaaaaaattagctgggcgcggtggcgggcgcctgtagtcccagctactcgggaggctgaggcaggagaatggcgtgaacccgggaagcggagcttgcagtgagccgagattgcgccactgcagtccgcagtccagcctgggcgacagagcaagactccgtctcaaaaaaaaaaaaaaaaaagaaaaatcataatcacaaaggcatttttaagaaaacaagaaagattaaaatcaagtaagcatgcagctcaggaagtcagtacaagaacaaaataagaacaataaaaaaaagtaggaaggaatgatttacagttatcctgtttattataaaaacagaaataaatgaactagaaaaccaaacaacaacaacaaaaaaacacaacccaattaataatcaatacaaccaaaaactagtttgtttggaagacccacgtaatggccaactctcgagtctaatgtagaaaaacaataatttagaaatgggagaatggggaagagaggcttaattacatatacacagattttaataatctataagaagtaactttttacctacacatttgaaaatatgaatgaaatagttgattctttaagagactaagttattaggacactgggcatggtggctcatgcctgtgatcccagcactttgggaggccaaggcaggcggatcccctgaggtcaggagttcaagaccagcctggccaacatggcaaaaccccatttctactaaaaatacaaaaattagcaaggcgtggtggcgcacacttgtaatcccagctactatggaggttgaggcacgagaattgcttgaacctgtaggcggaggttgcagtgagtggagattggagattggagattgccccactgcactccagcctaggcaacagactctgtctcaaaaaataaaataagttattaaaattgactcaagaataaattccgaaacagagcataggtattactatgcatcctttatagaaaaggaatctggggctcagaggttacacaatttgtccaaggtgacatagccagtaactgggaaaaactttatgtggatttgaagtgttttccttcacaccagtgattctctgggagagcttctgcacccccatcttcaaccctacacctaggacatttagtaatgcaacattttcagttaccacactgcacagaaaagattaaccactagaactgctccccattttcttataaatcaccataagtgattcttccagaaacattacaccatttgagtaggagaggcatgaataactctcatttcactccgtcaaaatgcctgttagatttattttattttatttttgagacagagtctcactcgcccaggctggagtgcagtggtaagatcttggctcactgcaacgtctgtctcccagttcaagtattctcttccctcagcctccctagcagctgggattataggcgcccaccaccacgcccggctaatttttgtatttttagtagagatggggtttcatcatgttggccaggctggcctcaaacatctgacctcaagtgatcagcccgcttcagcctcccaaagtgctgagattataggggtgagccaccgtgcccagctccctaacttagatttagacatgaagttcagttacttagcctaagttgttcttgccaataggttggcatagaaactttaagaggagagctcaaaacataaacagaggtaaatattgggaaaaataaccaatccaaatctgtttttctgaatctgtttaccaatatctttaatagtattaaagaacaagaagctatatgactgaattcttttcagttcattaaagttttcatatgtaagacacgagacactggaagagaatattcttctgacctttaactctgaaaccaattgtaggttgcctgggtttatgctatcagaagcaggaagctctgctgtttcagtctgtgaaaacaaaagtcacatcattagtctacactttatgtataatgtctgcctgcattacccactcatcaaaatgtctacttcgtattgtctttatttcctcttataacagcagcaaagctccaaatgcaaactgtttcactgataacaaagagaataggacctcccatatttaaaagaaacattttaatgaaccttaatttccccagaatgaacttaatgattacaatgaaatcatatcaaagaaacacgtcaaaccattcttaaacgtggaaggcccaatgcgcaagcaagtcatgctgtttacattcactaaggcatttcattccttcagagaaaatttcacagaggaaatggattgtacctgttcgacggaatgtttatgcagctcctggcatgtgtttctacagagctgattttctttaaaagtgaatgactcaatgggtggaggtgttcctggcgggacagagtcacagtcacaggtaggttgtccttgcctgcctgacacttgcagggtggtatgtggttttgctgggctgcctgaactgtcgaattgtttagtatcactggcaagacagactgagtctttcaaatgagcaagttggggtgtgcagcaagttcgtccagcaacttctgtagatgctttttcataggagccttgagggccaaaggctggagtagtacctaagatggggaaagcaggtgaacacatgtctgtggtaggcctgtcattatcatcaggcgcaaccgtatttaaaggagtataaagtaatatggatgaagaaaggcccgtctttgtatgctggctttgcgagtttggccttttgggatgtgattttcctggtagaacaataaggtcctcttctaagtcctccatttctgtatccatgcgtttaggactcagttcctctggaaaaatacagcttccctctttaagatgtctctctccaaacatttttgactcaaagggctccactggtttttctgagcaggacttcactttttcaagcttaagaggtccaaagtcttcatcaggtaactgaaagtctgtgatactgagaaaagacagtagttgctttaaactcagcattccatccctatgaaatggagccgtgaaagcatcatcatccaaggataaataagcactattactccaagaaagggaatcctctttttgatgacgacttttcttccctaaagaagaaaaataagtcacaaaatagtaacaaaacccaacaaaacagacaatctgtttcactgatgacaaagagaataggatctcctagatttaaaagaaacattttaatgaaccttaatttccccagaatgaacttaatgtttacaatgaagtcctatcaaagaaacatgttaaaccattcttaaatgtaatacccaacaaagagtgagcttctaaactcaaatatactaaaaaatgttcattacttttcccatccatgactcagaaacttgggcgaagggttcaaacaacggtcatgagttagttgattaattagcagctatttttctgcactacccaaaacagtgtattgctagccaggtatggtagctcacagctgtaatcctagtactttcagaggtcaaggtaagagaattgcttgagcccaggagttccagaccagcctgggcaacacagtgagactgtctttaaaaacaataaataaataaataaaaattaaaaaaaataaggccaggcatggtgcctcacacttgtagtctcagcactttcagaggctgaggcaggcggatcacttgaggtcaggagttcaagaccagcctggccaacatggtgaaaccccgtctctactaaaaatacaaaaaaaaaaaaaaaaaaaaattagccgggtgtggtggctggcgcctgtagtcccagctactccggaggctgaggtgggagaatggcgtgaacccaggaggcggagcttgcagttagcggagatggcaccactgcactccagcctgggcgacagagtgagactctgtctcaaaaaaaaaaaaaaaaaaaaaaaaaactaaactaaaaaaattagctgggcatggtggtgcgtgcctgtgatctcagctactcaggaagctgaggtaggagaatcacttgaacccgggaggcagaggttgcagtgggctgaaactgcaccactgcactccagcctgggcaacagagcgagattctgtctcaaaaaataaataaataaataaaaccaaaccaaacaaaacagtgtatggccaacagtataaataaataaatacataaataaataaaaccaaacaaaacaaaacagtgtatggtcaatagtattaactaggagaagggactgaggacaagtctcaactcaaccactgatttgcagtgaaaccttaggcaaatcgatttatttcattttcccttttctcattgtctctcataagggaaatgaactaaaaatacctacattctttcctacctctaaaactgtgatttcaacaggctgccagagtatgttctacaaaatgctggctcttctcactatggaaaacttagtccccttttgaagcaaagagtaatttactgctttttgtttgcttgtttgtttcaagacgaggtctcactctgttgcccaggctggagtgcagtggcgagatcttggctcactgcaacctctgcctcccaggctcaagcaatcctcccacatcagcctcctgagtagcaatttaccgctcttattgcaaatggtatcccacatcattcaaaatgttgctatatcctcaatgatgaatgcataaacaaactgtggtatatacatacaatggaatactagtcagccataaagaggaacaaagtactgatgcatgttacaacagaaacataccttaaaaacattatgctaagtggccaggctcagtggctcacacctataatcccatcactttgagaggctgaaggcaggtggatcacttgaggtcaggagtttgaggccagcctggacaacatggtgaaaccccgtctctactaaaaatacaaaaattacccaggcatggtggcaggcgcctgtaatctcagctactcaggaggttgaggcaggagaatcacttgaacctgggaggcagaggttgcagtgaaccaagattgtgccactgcactccagcctgggcaacagagtgacactccatctcaaaaacaaacaaacccattatgctgagcagccagacacaaaaggtcacatattgtatgattccatatatatgaaatacccagaacaggtaaatccatagagatagaatgcagattggtggttgcccagggatgaagtagggggtcaggggaggaaatgggtagcagctgcttaatgggtatggggtttaggggtgatgaaaatgttttagaatgagataaggtggtggttgcacaacactgtaaatgtattgacttgttcacttaatttaaaatggttaattttgttacgtgaatgtcaccttgagaaaaaaagtttttaaatgtagctgcagtttactacaattatagcagactatttcaaactactggctgggcctggtggctcacgcctgtaatcccagcactttgggaggccgaggtgggtagatcacctgaggtcaggagatagagaccagcctggccaacatggcaaaaacccatctctactgaaaatataaaaattagctgggtgtggtggtgggcacctgtaatctcagctactcagggggctgaggtgggagaatcgcttgaacctgggaggcagaggttgcagtgagctgagatagcgccactgcaccctatccggggcgacaagggtgaaactgtctcaacaacaataaaaaaaaactactgtgtaaaaaacagtatttctagattactggattgcctactttttgatgactttgtatccttgttcgcttaaaagatgatgaaaagtcacaattattatttttggattaattagtcacagcttatagaccaagtccatgtccaatggtacagagcagcctgctacctatttttgcacataaagttgtttttttgttttaggaacttggctgtaaagtgcatataaaggtgcgttggaacacagtcacagttacaagttgactggctgctctggcacatagctgagtagttgagacagacagaacacaaagactaaaatctgtgctatctggcccattctagaaagtatgctgatccctagtttagagccacaatgaattacccagattttgtgcttagttcatcagatatgattaaattctcagtaaatgaattgaaagtttaaattacaatgtatcgttgctgcccatcctccaaaattctgtgtcccttggaggccttagagacactgcattagatattttatccaaaaaagttgcttaggccttttcattacatgatgacttctaaaagagatagtcagtggagtcttagtcttgtttttttttgagagagggttttgctctatcacccagactggagtgcagtggtgcaatcacagctcaccgcagcctcaacctcctgagctcaagtgatcctcccacctcagcctctcaagtagctgaaaccacaggcatataccaccacacctggctaatttttctatatttttttttgtagagatggggtttcatcattttacccaagctggtctcaaactcctgggctcaagcaatcctcccaccttggcctcccgaagtgctgggattacaggggtgagccaccaagcccaacatagagtcttcctctagtacacattccattttacttcaaaaacactttctatgttagctgtgaagcttctacccaaagaattgtattgaacctgaatatgtaatattacgtaaacaaccaatacattttccttttcagtgttgaattgtttcagctctattagtgaactctggcaccataccgccaggtttgaatcctggctctgtgattttaattaaattaagtaaagttattttaatctccctgtactttagtttcctcacctgtaaagtgagaatgaaaatagattctacctcacataggactgctgtgatgattcaatgagttagtatctgtacaacatttagaaagtgccaggcaagctggacacagtggctcacgtctgtaatcccagcactttgagaggctgtggtgggaggattgtttgaggccaggagttcaagatcagcctgggcaacagggcaggacctcacctctacaaaaaattttaaaacattagccaggcatggtggtacatgccagtagtcccagctagttgggaggctgaggcaggaggaacatttgagcccaggagatagaggctgcaccacggcactccagcctggacaacagtgagcccctgtctctttatttttatttatttatttatttatttatttatttatttatttaaatttttttgagccagggtctcactctgttcctcagcctcccaaagtgctgggattacagacgtaagccaccacacttggccctgtcactttttagaaaagaaagaaaaggaagtgccaggcaaatagtaattgttaactttcatcatcatcatcatcatcatcaaacacatcttgatttacctttcacttgaataaataatttttcgtgctgatatttgtgtgaggtgacttcttccttggacctgttaacaatcgacaggctagaagttggcaaaagtggttcacaatgatctgatgctggggtgcaggctgattttctttttcctgtgtatcttctaccaggtgcttgggcaactgccttcctagacaagtcattatcttcagtgggcccagcgggagagctgactttagttaatgagagaagtttctgagaggttcttgaacttggttgtcctgtgcatgtgccagacatcctaatttcactttggtcagtttcctcattggaaaggtttaaatttttacttgcatccttatttttatttttaaacccttttttcttgacatccaaatgactctgaatgacagcctccacggctactttcctctggcaattggacatgcttcgtgttgttctaacataatattctgcaggaaacagaaggccttcaggcactgtgcaagaatgtttttctgcagaaagaggagaggttgcttccaggctaagactcttaggttgacttagaatctcactttcctgaagattttcattcctgccatcaagagtgtcactgggagattttaaagatttctctgtttgattttgttcttttaagttttggttttcatttgctggtaagttattgtaggtgagttcatttagagaacatgaaatatttgcctctaaattagaacttgtgggcagttggccacttttacttatagctttatttacaaggaggttatctgtagagacagtcatttttttgccttgtgcctccaaacttacaggtgaagtaaatctaatgttttttaggtcgtgagtagtaagttcactgctacctttaggaggaatgtgttcaaggtgctgactactaccgctatctgatagagtctgtaaaggaactgtagtcgccctggtgaaattaggtcttcttaggaatgtatcaacacctttttctggttgggcagttggtggaattaatacactgtcttcattaatttctgtaactggttctggagaatctggaagttcagatttaagacttaaaaggtgagttcttatttcagttactggtgatctagcaggatttttgctactgatttcttcctgttcctttagtcttttcccagacaatctgagtgaatcagtgccaaagacacagtctctctcctgtgaaataaatgtcctcttctgctgcttctttcttctgcttggcagcttctgcttttgctcaccactagggtcactgaccctgtggggaaaatgttcttgggtgtcatctgttctttgtataggtaatcctcctgggccatctccagggttaaaggactcaggcccaacatcaagtgtgatagatgtcttttctccagtttcttcatcaagatgggttttgatgtgtaacttgtcataaacacatattttatttttaggttctgaggaggaaaaaaatgtatataacttatatttttcttataaaataaaacaaaaaatactcatttttaacctattatatataaatactactaaacatttatttaagaaagaatcagtgacatttcattcaggcagatgaatttacaggtgaaataaacctattttttaggctgtgagtagtaaggtcactgttacctttaggaggaatgtgttcaaggtgttgactacttctactatctgatggagtatgtaaaggaactgtacatactccatactgtacatatttttaaaagttctgattttttaaattctaataatctatgaaattttaagtacatataaacaaacagcattgtgctaaaaatgttttttaaacgaacagagtattctttatcacacaatctcttctcttaacttctaaatctcaactagttttctatctcatgtatttctttctttattttcccccttggctcaagtaattttaataacactcccatttcaataacccctcagttttatgattataaattacttgaatgtaaacatcagaattgatcattgtttttagaatattttcacctagaatttttctctgttcatatatacttacatttttaaaaaaaacctttcactgggcacggtggctcacacctgtaatcccagcactttgggaggctgaggcaggcagatctcaaggtcaggagatcaagaccatcctggccaacatggtgaaaccctgtctctactaaaaatacaaaaattagctgggcgtggcggtgtgcgcctgtagtcccaggtactcgggaggctgaggcaggagaattgcttgaacccaggaggtggaggctgcagtgagctgtgattgagccactgtactccagccttgatgacagagtgagactctgtctcaaaataaaaacaaaacaaaacaaaaaacctttctaatatttaaacaataaatataatttctgaaaattgagagggaaaaagagcaagagagggaaaaagaataaacagtctaactgaaaatagagactatagattttacggcatatgaattttatgttaattagaatatattgcagccgggcacagtggctcacacctgtatcccagcactttgggaggcccaggcagacagatcatttgaagccaggggttcaagaccggcctggccaacatggcgaaaccccatctctactaaaaatataacaattagtcaggtgtggtagtgcacgtgcctgtagtcccagctactcaggaggctgaggcacgagaatcacttgagcctgggagttggaggttgtagtgagccaagattgtgccactgcactccagcctgggtaacaaagagtgagactctgtctcaaaaaaataaaattaaaattaaaattaaaattaaagcgtctattgctagtcattatcttcacactgtgggaaaaagaacaatagccaaaatatacctgggaaatgaataataaagcaggcataagtgaatggtctagatttacctgagtgttttagctgcggtgagagatcctgctgagacaaacaatcttgttcttctactgttttcttaatagaatgcttaatcttttcagctctttgggcacgctagaggagacaaaaacagccccagaaatacgttttctttaaagttttatagagtcaagaactgtttttaaattgtttgtactataacaccttaatttgagaatacgattcacttacctgaaggcgggctagtgtcttgctgtattcccttttcaagaatgctaatttctcctttaactggaagaagaaaaacaccaacaatactgggcaagtggaaaggtggagtcagagggaagggatgcagtgcttggcggggtcccttggcaagaggcagggagtagcactggtccataacaatctacttttggttctcaaaaagcaccaagctctgaccatttcaggatctttgcataacctgttcctatcatctggaacatgtccttcctttgccaattcctactgattcctcaaaccttagcttagatttttatttccctgggatagacttctaggtccttctccaaatctaggttagacactctaccagtcctctgtactttccttaccacagtattctcacactatgttctctgtttctccccatcatccagatccttgaaggtagcaggaactgccatcctcagtcactcaacaaatgaatcttctatttatccgttaatggtccaggtatctctagtacctggaataataattgatacccactatgtgtcaattagtgctccagatgctattctagatgcaatttacatacagtgagggagacagataataaataagaaaacaaacagaaatgattttacaaggtaaaaaaatacacagataaacagagtgatatgagagagttactggcctactgacagggactactttagttacagtggtcagggaggcatttttgactatcatttgagcctaagactgaatgaggaaggagctagttttgggaagatcagagggaacggtaccccaggcagagggaaccacaaatataaaagctctgcagtggaataggttacctacgtttgaggaacacgcagaaggccagtgaggttggagctatcattgctcaatctccagccaggcacacagtaggcatttaacaaatatttattaaataaataaatgaattgggctgaatcaaattactgttctctgaaagcctagattccctcgtctctctggcttctttgcttcaaaggattctctcagcagcaaagccagcctcggtttttctgctttttagcaactttttagctgtactcatctttcaaccaacaaaacatcaagatttccatcctccatacatgccttttttaaaaaaaagaaaagacctactcagctgggcgcagtggctcacgcctgtaatcccaacacttggggaagctgaggtgggtggatcatttgaggtcaagagttcgagacccgcctggccaacatggtgaaatcctgcttctactaaagatacaaaaatgagccgggtgtggtggtgggtgcctgtaggaggctgaagcaggagaattgcttgaacccggaggcggaggttgcagtgggcctagatcacgccactgcactccagcctgggcaacagagcgagactctgcttgaaaaaaaaaaaaaaaaaaaaggccgggtgcagtggctcacacctgtaatcccagcactttggaaggccaaggcgggcagattacctgaggtcaggagttcaaaaccagcctggccaacatggagaaaccctgtctctactaaaaatacaaaaattagcccggcgtggtgttgggcgtctgtaatcccaactactcgggaggctgaggcaggagaatcgcttgaacctgagaggcggaggttgcagtgagccaagatcgagccactgcactccagcctgggagatagagcggagagtctgtctcaaaaacaaacaaaacaaaacctatgtgcaaaacatgctactagacaagttgccaaccgtaaggaattttctttttttttgagagacagtctcactctgtcgtccagcctggcgtgcagtggcgcgatctcggcagctccctgcaacctcagcgtcccctggttcaagcgattctcgtgcatcagcctctgaggcctgagcctctgggactacaggctggcgtcaccacacccggctaatttttgtatttttagtagagacggggtttcactacgttgcctaggctggtctcaaactctgagctcaagcgatctgcccatctcggcctcccaaagtgcggggattacaggcgtgagccagggagactggcctcccaccaatcttatcaatgtctggggattatcttgtttacttataaatgatctttctcacctccaccagaaggtaagccaggataagaataacatcagcacaagctggaaacatcctaaaagtctatcagtaaagtacagtctaaagaagcaagggcacttccaaggccaggtgcagtggcgggttcgtgtaatcccagctactcgggaggctgaggcaggagagtcgcttgatcccaggaagcggaggttgcagtgagccgagatcgcgccactgcaccccagcatgggtggcagagtgagactctgtctcaaaaaagaagaaaaacagaaaaggaagaaaaaagaaacaaaacgagggcacttccaaactacaacatactgtctagaacttaaaaaagaaagcaaggtagataaacatgtcctgacaggaaagctaaacggaacctgcagaaccattcagatcataccatttatgaacattcccttctccaaaaaatatacataggattcctttttggtggttagggatacgcccctcctccaccacccacattaacacacgaaaggacctggaagtaccagacttaaaagatttacttgaggccgtccggggggagaagtaaagattgagggtgtgggaggggggaggagcaagggtgtcgatacagctttatctacaaactgttacacattgtattaatgcgctgctactgtaatgaaatttgttctttaaacgccaccacgtgagcaccacgctatttccacattttcattttctgtgccccctcagccctaagaggagggggtggtcagatgatactgctgccctcggactgccgaggacacaaagccaggcctaaaaccctgggaaagcggggtcagagtcctgcgtccgcccttcccgcacccccggcaccttttccttctcctcacagctgaggggcttcccgggaggctcgtccatcgggcaggcgacagaacgaaaagagcagccgtcgccgaccccaggcctgccgacaccgggacccagttggccctgggccggggaggcgccccaggaaggaatggggagcccgggatcgcaccctcagtgcgcgatcagctgacccacgcgggc

SEQ ID NO: 39 - DNA, 84038 bp, Homo sapiens
  source 1..84038: mol_type = genomic DNA; note = HGNC Approved Gene Symbol: BARD1; note = Cytogenetic location: 2q35; note = Genomic coordinates (GRCh38): 2:214,725,646-214,809,683
caacttctcaatatttatttattcattcagtttgatgtgcgtatctttgaaaagggttgacttataaagaaatacatgaagtttacaatctgtagctcaatctatcaaagaaaatggtggcttttagtaattaaataagacaagcattagttcctaccattttaatgtgttcagggtaggaaacagaatagacaattgtgactgtaatgaggcccatgaacgtttagaatatgattaatgcattttccacactgacccatggaaacaataacagctaatgtggccccactctcacctgtgaatcgtcttattcccacaggaaacatcaaacctccccaaatatcatcctctaggcagaggtcacttaactattaaatttacaaggcaggtgcaaaaaaaaaaaaaggtggggggaccgatgaaataaaggaaaaattctatttactaaaattcaagtagctaaactatcttttaggtgaagtcagtgaaaaccttcacacattgctcatttacccttatttcaatcataatgctaatatacttcccatctggtttctatttttcagcaagtcaaaagaaaaaacaattgagatagatatggtaaagtattagcagagacagaaaaatagctacaaagtggcagctgtcaaggaaaaagggaaacagttataaattcaagtagaactagaaaatagccatgagaatgtggaaaagctaccagcctctcacttttagagacacaaagcaatcagtgtgtaattgtttcttaatgactattccaaactatcaaagttatactgtattcggaataatctaaggtaataaagtatctagtacactttagaaatatttttattcaaaattaattaaaaagcattatgttaaaaaagataagcttttgttagttaatagacttcctcaccaagtcatgttgagcctcattcaacagcacagaataagccaattttatacaagacacaggtatatggaaacacaaataactttaatgatttgtggtaaaaaagaaggaagcttgaatctatgattgaaaaataaaaaataattacatgtatatctacacagaaagtacaatcacaagtttcaagagcttaacacaaactaactgctgtcaaatatttaacaaaagcaaagatgaaactgcttaacagtcagggaaaaacaacaaaaagaagggaggggtgataaaccaagaaaatgaatgacaaaaactaagagacctcataggtgtctttacaatcaggaattcagatgcaaggaacagacacaaacctgtctaaaatgtgacctatgaggcaacagaaagtgacttaaagtctgttataaataaaaaatgacaaccaaaatcctagagagtcttaaattatttaatccagacattatctaacgcctcggatttttgtttggtgctatggtgttcattttctatcagaatgaaatgtgggacaaatgcattactggttgtagagagtgtttcagagctaattcacccagcaaggtcagggtcaaaaggttattattttgttcatatatttcttgatatgaaaaaacaacatgtcaaagaaagaattaaagcaaaatgtgttttcaaatgataaacagaatctcaaactttcaagtaagtgcatcttaagatgttgatgaacttcagagattctcactattttaaaactagggatattctattctggtagttatcaaactgtcctcttttgttcatgaggaaccaaactggcaagtctctcagtgtctccttccccaagtctttaattttataagtatattcaatgtctaggaaggaattattaaagaattctgcttcttaaaaaaatgtttcaaaataatctaatgtatccttgtcgattcatgaatgagagcacccagagcagagtaacctccccacatctggccactctcaggtggtatcctgcccactcactaaggccttgcctatttgatattagtaagccctccccatacctacttctatacttactgtatggccttttgtatgatctggaaaaaatctgttgtaaatcaagtaatcaccaacttctgcctccatgccaacctaaaaactttaaaaaaaaccttttccttttacaaaggaagaaattaagaccttcaaaattattttacaaataccaacaaggtttaccagaagaagactgcttcttaatttaaagtaatgacgttggactgacaatttgctagactggtcagaccttttaaaaaatactaacattaaaatgtgttagagaaaatgctctaagtatatatacacatgtagtagataaacagagttacaaattgatagttacaagcaaatgtacagaataaaaatatgtaccatgagcctagtgttgatttttaccacacacacaaaaaaaccaatgttaatgattaaatcacaatttcctgatgatatacaagataaaaaacagggatgaaagtgtagaaacacacaacaaagtaaattattaagaaaagaaatgaacacaatataggataaagacaattgcagataggagaatttaacacctatggtggcacatttagaccaaatactcttttttcaataaagccaaaataaattgtttgataatattctgtttactaaaaaaaaaaaaaaaaaaaaggcaagttttttcactggtggcaggtatggagaatattaaaagactcaaacagtaatgataccacttgtctatttaaccaagattctggtgtcctcattaatctttgatacccaataatctgaatagaaagacatgataaatcaaaaacatgccaattttaaaaagaaaaacctttaaaagcaatcccagcttctaaatggtaaacataacatgaattcctaatctggcattagactttttttttttttttgattcaaagacaaatatgaatgactctacctatttgtaaaaatgtgaacattaaaaacagtacaatgactgggctctcacaaaccgtgcaaattcaatttgaaatgttcatctggtataatattcagctgtcaagaggaagcaactcaaaggacatcacacagtctataaaccagctcgaaggagccttccagactttgccctgccgaaccctctctgggtgataattacacaaatcttcatagatgatatactgtgtgcagaagcgctgatcagaatcgggtctcgcatggtatgcgactgtattgatggtctgagtcacgtcactgtctggcttgggctttctactgaggatctggcccccacctgcagtgacgagcttaataaggttgtcctttggatggtgtttgaaggttccccacaaatagaagtagcatccatcaaacagctttggcaactgaaataatgagaaaacatttgttaaaggcagatcaaaatactgtattcaaaaacactgtatatgaatgaggaaaataaaaatacaagttgaatatcccttacctgaaacatttggaggagaagcatttcagattcataaattttttgggttttggaaaatttgcatatacatgaggtatcttaaggatgaggctcaagcctaaacacaaaattcgtttgtttcttgtacaccttatgcacatagcctgaagtaattttatacaatatcttcagtaattttgtgcatgaaacaaaattttgactgtgttctgaccgtgacctgtcacatgaggtcaggtgtggaattttccacttgtggcatcatgtcaaagctcaaaaagttttggattttggagcattttagatgttggattaggaatgctccatctgtaacaattatgagcagctaagaagctacttaatgaggtgctgggacaagttatatttcaagcatactaactggatcaagaaaaatacttaggcaaataggggcttcctatttacaattttttccctaagattcagtcaccatctcggttccttttcactcttctaaaattttagatatgcttggtataaagaaaaaaacaaactattcatcaaacttttttcatcaggatgtttatgcttatttggtgggacttaaagcctccacaactcctagcttatttgaaataggcttcagagacaccaggctaaacattattaaattacaagagtaacatcttttccgtggacttttatccaattctgcccatccacattcaggtccttacatattaccaacctaaggtctccagggcagccaccatgggggtgtgccctccagggttccagaaatgtattcacggggcacaaaagatttttgtgctgaggctagggatccaattagctatgaaacatacttccgtatgctcgttggaaataaaaaaagtttcataattcccttctatggaaattttctttgtgacttctaatatacttatataatatcaacaggataatgcgatattatccattaaagctacaatatgtggccatagagacatatggtaactaaatccaagcagcagctgtaagtcttctttcaagctacttcctgtatctgagatttacctcagattctgaaaggtttatggcaatgttcaagatgccaaaaatccattaacagtatgaaattattaccttctggattttactgctcatcgtgatcatctttcagaatcaagtgcttgaaataagcacaattaaaattttaatcagtcacctgtagctgttgaaagggcagaagttcttcctgatggtgataataatagtatgtcataataagaacaatgaaagttgtattaaaagaaaaataccagctgttctctgttgagcctgcttctgcgtggaccttcaggaatttcatacttttcttcctgttcacatacttttcttcgtagacatgcttttacccctgacaaaaacacaagaattaaagcaaactaagtatcaagtgagcactatatctctctcattaaaatcaagcaatttacctaagtggtttttcttcttcatggcagtttttaagtattattctaaaatgcaaacagaaatcttacttatgccaaaacaaaatgtaatacaactggttttcccatataaagaaaatattttaaaaaactctttctttggaggattaagccataagttagtactgaacactaactgtaattttaatctcctttctgaaaaacctaagccaggatactatttcaaagacaaaaataaaagtctacatttccactcatagcaattacccaaaattaaggtgaataaaaagtccatgacacaataacctaaactgagcacttaccatctatactgctcattttgacagttatatgtctaatcgtctgttaaactgtaagtgatttgacatgaaggaatgtgctttagtctacagcaccaagctcagctagccacacaacaggggttcaacagcgcttcctaaaataaacaagcagagcttgggataggtttggcatgtgacaggtacacaactgaggttgctagtctagagatgatttgattgggctttgcaggaaaaaaaaaagcattcttttgatggcttgagtaagtctgttcacagcttcaggttaaaaagcaaaagcaatagagacagctcagcctggcactgtttagagtcattccactgcttggcacctgggtggggaatccctaagtagggccactggctggcagccagtaccaattgtctcgctaggctctagaaatgaaaggaacccttgggattcccaggaccaatcatgaaggacatggtcagcttcagctagagacaacatcttggataatgcctgtttaccaccaagcgagggaactgatggcatgtatatatatttatcatgcttctgttctgatggcatataactaaactaaatttgagatttgcagttgaaggacttggctatcccaattacttgttctggaagcttccttgcctatggaaataaaaaatgaaaacaatgtttttcaccgggcttctgtggataaaatgcaagaagcattctaaaaactagatactacaatgaattatcttcatcataaaaacaaaccctccatacaatttcctatttgtctttgaggttgttttgctcaatacttcattttatcactgagggtaggaaccatatattattcacctatgcgttcttcagaatttcatacactttcccatagaacaggagtttaatagcagagggtatcgggaaagttggaacaataactcaggtatccccttcactgtctagtgttgttaacataaaggaacaaaagtttttaaaaattcactatggacacagcattgacagattgtatccacatcaataaaaataagtaattatatagcacctgtaagagttcagagttacacatagttttgaatatcaaactgttacatcctgttatcacttgatatctaatggcttaaaatgatcagaaaaaaatctatggctgcataaacatatactttatattgaggattagacatatatgttggatatactacagtgttttggaaacctcttgaaaaatgctagtgataaagttttgtccagctgatccctacttacttcaacagtaaattgattccaacacaggagcagaaccactactcggcatgtaaactgcatatgcctgcaaaagggctcctttcttgactaaagggtggctaagaaccaacagttaatctgctacccagaactgtcctgcgattgcatctaatataaattaagattcagttgtgtatgagtaaaatgtcttttgacctatgatgatttttttttcttttttttttttttctgagacagagtcttgcactgtcacccaggttggggcgcagtggcgcaatctcggctcactgcaagctccgcctcctgggttcacacctttctcctgcctcagcctcccaagtagctgggactacaggcgcccgccaccatgtctggctaattttttgtacttttagtagagacaggctttcatcgcgttagccaggatggtctcgatctcctgacctcgtgatctgcacacctcagcctcccaaagtgctgggattacaggcgtgaaccaccacaccttgctgacctataatgattatcttgagagcaaaaacttatactggagaagaaaaagaaatgcaatgttttccaagagtgagtaatggtccactttagactaactcagactttatggcataatcggttttaaactttcttctttattaccccacactgacacaataacaaaacttcaactgtttccaggagccacatctgcagaatttggagtaagcgacagaactgaaaaaactggtactttctgagggaaaaaaaatgtgtttgagtcctctttataaaatgttttatttattctaatcttgtaacttgaattttgaaaatacctagaatcaaataacttacgaggtagaaaagaccctgaagagctagtcctaccttcttgttttaaagatctgcacagtcaagtgcagaaacataaagtgacttgctaagatcactaatagcaaagttaaagtgaaccacttcctaaagcaacagacttccacttcggcgctcttcctatatcatatttataggccaagtatcccttatctgaagtgtttgaaaccacaagtgttttaaaattcaattttgttttggattttggaatatttgcacgtacataattaggtatatcttggcaacaagacccaagtctaaaaaagaaattcatttatgtttcatatacgctttatacagataaagcatatatgaagataattttatatactatctttaataattttgtgcataaagttgtgtctgcgtttagactgtgagccatcatgttaggtcgtgtgtgttgtgctggcactcaaatagtttagtattttacagcattttggattttcagattaggaatgctcaaactgtgttaaacacctatcatgtacaagagaagtcataatctcttccctaagaagaaaattcctgctgtttcctgtcactttatttcaataatctaatcctgaactttcattaatattgtatgctctatctcagagtgcttaattttaaatgaaattttattgctttattttcctctgtcaacaagcaatccactatcaaatttaatttttcaagcacatttaaaattacatccatgttttaaagatattaaggatgccactgagataatctcaatcatggtatatctaataacaagaaaactccctactcttgtccagaaatcctaagaacttcacattacgtaaacttctgttacaaagtcagtgaaagaaaaaaggttaatagcttatacatagacaaacatgagaagattcgtttttcagattcagcttttccctcttttcctacttaaaatggctaacctttcaaagaataacaaatgtgggagcagatttgcttgccagaaagataataaaatattcttttatattttgcatgtatttcaatgttaaaagcaaagataataggttttttgaataaaatgtttgaatgcaaagttgtttctgaaaataatggaggaccaatatattttaaatattaaaaaaatatgctggaagtattaatgatttacatgtattagtgaagtggtattcaaaaatactaataaagcaggaaataatacacagccagagttttagccatttatagctcttgttaaacaaatacgaaatcacaatattaaatatggaaagaaaaagtagaacatcattaagaaaatatggaataagttgttccattgttacttctctgggtttaaattgagtagaacctgagtagaatttatttgattgtatataagtttattttacacctgtaaatactatcagacagaactctcttcttataaattaatagagaaccatgagagcagtatcattttataaaaactatgaatgctatgttacctaatattcatccaatgagcaaaatactttactatagattgaacgtgtacattgtgcagtgctctgaaaactttaatttttccacaatctagaataaaatactcataaatcataaggcctaaccaatccaatgctaaaaatcacacaccaatattttctggtcaaaggagaaaaagaaaattcttaaaataccaatttattctattctgttttctttttacttttctaactttaaatgaccaaggacacaactgtttgttctaagaaaagatcctgatcaaaattactgtgataacagctaccaaaagtacttgtatccttccccaaatccagcaagagtagtatagtcaatgctcattatctacagtagttatgttctataaagatgctatgaacaccgattagtgaataatgaaacactgctgttaaaggaaatacagggttacatttctgtgggcctgtggctccagcatttccatcaactgatcaatacttaactttgttttatgtatgtttctgtttatacacattatttattgtatactgttgactcattaagattaaacttagggccagcagtactacaattaaggccttaacaaagcttatcctacacagtatttaatattttccctgaaaggcacatcaccatcttcttgagcttagactcacaaaacagcacttcagcactgtattatgaggccattttaaataataaaatcagcaacaaaaacacaaaaatgcaaaaaacatggcatcaacagactgtgaaagggccacttgtttacagcgtgagagctgaaaagaggaggtaaagtatcaccttgtttgacctcagctggggacacacttgtttgtcaactaaagttcttcactactctgtacatgtctacaaaagcactgtgagtattgatttggggattacaagaaaaattttagcaagtaagaaaactcacaaacacagaatccacaaacaatgaggatttactgtttattacttccaattcaggggagggaactgaaatgctaagaagtcaacttgcttaaagctgaatgcagccattaagtggcagaatgggaatttgaacctaaatctgcttagttttctaaaggctgtgtatttcacactgaaatataacttagtggtacacaagataaaccttgggtattatcttagcatgatgtgaatatgtcaaatgcttaaaagctgcttaaattgagtgttctaagatgttgtttattataaaaaggtcagaagactaacaactgaatactccatctctccaaaagcagaggtttgtcaagacgctgagtctttcctgaattgggtcattaatgcaaattcaaattcaacactcacactcaggacgtctatgattacccatcatgtcaatcttaatttgttagttttatctgtgttttatttggctctcagatctctctcccccatttttttaatatgaaagtcatattcacccaaggttgctaagctgaatttccgaatcttataattttaaattatcataaatgtgctttgaaaattgtttacatataataaaaattatactctaaaaaaggcataaattttaataaccactcactgaattaaaaacctttctaataaaggtaatataaatattaattttattatacattgaaaatgagactcaaaattcttgactgggtcaaaataccatactagaagcactgccagtgtgctggaattatgtcatatattgtttctatattaaaaatcaaataaaaaaccatcaggaatccagtgaaatggttaactcaaattcactattttatatgtgatttttttattttcctcattacgtaagcaggtattccccttcccaaatctccttcccaatggtacttacagagtattcataattgtatctttaactgcatatggtggcacagaaagccaaggactgaacattcttatgatatctactgtatcgaatgaatggctaatgtctaattgcagaattaagtaggctgtgcttgtgccagctgcttctccattttatgggtttatttgactgattatttacaagaaacacattaaaatggcatctattcctcctgaaaacatgctggcattagtcaatcaacagaatttaaccttaatagatactacagtccagtaagtatggcatcaaaaaaatgagatggcagataccaacagagcagcatggtacttccatgagaaggagccagtgtaagtcttaattcattaaatattctgtttcatgggagttatgtagtaagtttctgtaaagtaaagcaaatccaatgctctagttacaatgattgagttaaacaaatacatttctctaatatgcttttactccaagcaacaatttgcagaatcctgtgtcacctaagactaactaaggaagaatgaaagtagctctttttcttttcctgaaaagaaaggatgtttccaggtctacaactacatttgaagggtggcaaagtgttttgttaaagttgctgttatagcatagaaaatctctagaattttttcaaagctgggagtgacaactacttcaaggattgcgactcaaatgcctacaaaagccaggtagattacataaatgtgtgaagaacctggtgtgaggtggtaggaagctatggagactgtaacaaacatcatgcctaaatatataaaaattaattatgttagacaaaaccagacactgtatttccttcagccctcagagtcctcagcctgccgatttgaaacttttgatgctttgtctaatcaacctcttttatagataaggaaacttaagtcccaagagatttaagtggctttctcagtgacataactgagatgagaactgaaatatcctccatgtcacagatcaagtttttttgttcatctttatttttagttggatcaatgtgcttactcaatccgacatgctaaggttgccactgtctaacttgttatctgaaactgtgagtttcagaatgatgacctactccggagacaataccacagttacaaattcatatcaacttcctactgaacctttttttaagacaaatcaattgagttgatttactgaaaagtaaataagaatgaaatgctttaaaataaactttcagcaattcaaatggtgatacattatcaatgcactggaagaatctaccagccaaacattacttaattaacccaagcctaaataatgactaacattttaaggttttatttactgaataaaagttaagcaatctgcagcaagaattcttaacctattttccatttaaaacacagttacattttaagatttaaactattttatatttgtaataaacagttaataaagtccataattattccatcagtttagtagaaagatgaactcttctacttccttttgaagaaaaaaaaagcaaaaatacaaatataagaccacattttagttagctttcttggctaataatttccttactaaaattaccttgcatgagtaagtttacgtaaacataacttttgcatatgccagaatgatacatacttgaaaatgtgtcaagccactaaccttataaaatgtatgctttatttcatctttgttacttttcatatgttcctttatagttgaaggttttgactgaagctatcacttcgcagaaacaaacggatgaactacttagctattacaactagagattcttttagcccaggtgtattcctgatcatgttctccatttcatgtaagctttccttttttcctgagatcttattaattttttacatataggtaagcagccccatttctaaagtactgattaacccaaagtcattaaggtagctctgtctaccttagcaaagcctggaatttttgcataataatgacgcttatgaattccagggctacaacacttttctataaagaaacttgtactgtacagaaggtatttttttattctaaattgctaataaccactctctcctcctacctcataaaagcatatacatcagtagatgtatatttctgttttagctgcatggaccactgatgatggtcatggttttatattaagcttacatttcctataataaaaaaagataacacaaatgcaaggaaattaaaaaaaggaggggtgttcctgaatccacagttatacaaaaatgatgagagaatacaatgaagatggaagaaaacttcaaaatggagatctgttaaatgtccaaaggaggagacgattattaactctgcatggaaagccatacttagaattttctcactcttcaaatcccagagtagtaaacagatccacattttaaagaatttttaggccagacctggtggctcgcacttgtaatgctagcactctgggagggtgaagcaggaagaccgcttgaaacaaggagttcaagaacagcctgggcaacaaagtgagatctctgcctcaactaaaaagaaaaaaaaaattagccaggcatggtggtgagtgcctgtagttccagctactcaggaggctgaagcaggaggatcacttgaacccaggagttcatggctgcaaagagctatgattgcaccactgcagtccagcctgtgtgacagagtgagggaggggaaaaaagggttgttattattctggaattaatggctatttgtaactgaaatagctatgggaatcagaattaaccacttttagtcaatacaaaatatcctaaaaaaaaaaaattaaaatacagaatcaaacatcactattctatatgaaaacaaatgttctactacagtatgtcattagatctaaactaaagatgtttaaattagggatgtgtgtcactcaagataacagtatgtaagtaaaataaaaattaaagaatttcctttgattctattaaaaatcaacacccagattgtaaaagcaaaacaagtgttttgcaaatgattatattttagactttttagtcgagtaaactataacagcactaaactttagtaaaaagggacatcacaataggcagcctacaacaatgacaaaaatgaaaaaacagtagcatactatcactgcaatttttggaaaacttaagtaaaagaacagagaaatgagtttgaaatttgaaacttccatagcgaaaagtgaaaggacaatgaaataaaggctgaaaatataaaataaaggctaaatgtttccatttaagatttgagatatctcattaaatactgtcgacagtcattaaattctggctccatataaatatcatttagcaattatttatttttgacattttagtaaaaattctggctatcagcatatttatatgtagaaatatatttcttcacattacaagatgtgtaatttgctattttacttaatgcattgagaagcaggttaaattctattgcaaaaatatattattatatcataaatttttcttagacaaaacttgggtatcaattctaagaccttgtattatgcataataatatcaaaatatcaaaatagtctatctcttgtattatgaataatatcaaaattgtctgtctctatataggtatggttaaaaaccgaacacagtctaacgtccaaaaattctcctaattattagaaaactcatgctcagtgttcttttgaagtcatatattaaaagttcaaatttttatgtaaaaaattctgttctgattaggacaatcaccatattcaaatgtatttgctgggtatccattaaacaggtataaaagacctgttgtatcagatgggaggaataaatacatgcaggttctaatttccctaattaagaccaaagcccttccctatccaattaatcgttagaaaagtgaaaatacttccaattattattacaacttgaaaatttcaacgtattaatttattcctagagaacttaaatttgatctaacaggcacacactatttttaaaactgttataaacaaatagtcctcttcagtaacccaccaatttactgctctttgattatttttttacccacatgcatgcatacatttatatattgttgaaagtgaagatataattttgatgtgtttaaaatttaaacaattctatttttcataatcttttagtcttaatatttatcatattaaaaatatgcattttttccagagagtatcttcaggcatttcagaattttcctaatctttcatatgtaggttatattctctacttcttgctgttagaagtaacactgcaaatactttttctttcatctgtatttcttgcgtagggtaaattctcagaactgggactattagatcaaaggatgttatttttttttattcttagacaatctttggtggaagccttctgtcagcataaagttgcctaatcaatcttaatttatacgaatgtttttttttaaataattagcaaagtctgtatagaataaaagttgcatttaattttaaaattccatagtactctcagtatccatttaaagaagccaacttgttagaatttgtttgaaaagaattaatgtgttagcctgattatgaggttatttattaaatgatgatgtaatgattgtcttctagggtccatctctcctcagctaaaacaaaaatgaaaaaacactcaatttagcccttccccatctcacagacataaatccagtgtaaaatgtctggcacattccttcagtaattcccttaggtactggggaattttacaacttctacagctgcaattttatttaaacttagatgagagtggggaagagggaaagattattaaagaaaagatgacagccatctgttctccccttcataatgagataagaaaagaagatgtagaattaaatttattttagaaaaaaaggctaagatacaaaaaaattttgaaagcagtgtactaaaagaataggtcagtagaaaacattttatcttggcctagtttgcatctttaggatacagtttcatcttattcatactctatgagattcgtaagatgacttatttatataccttctattctttcattcttatcacctctttaatgccaaaatcaaccttgtatgagggtggtgctaatggcctgtgagaaattagcacccagactaggactaaagtagagtctccctcaccattttgatgttgaaggagggacttttcttatctatagctcctatttctgtaaaatataaaataagtatcattctgtaaaatatctgtaaaagaaatataagatagactggatggtctgtaaaattatggcttagtctcagaatcctcatgctaagttcattaattatggcactgtaagatactctgtataaacaatgtaggaaaataagagatattaaccaattaagacagaacacttcaacagaaaacttctcatagttaaatttggacccaatggatccaaatcttttgtataattctttttgttaaatggtttagtttataaaatgtgttgattatctatagagaaaattacaaataaaattctacttgaatctatttggtttatgagaaatcccatgaaaagttaatatgaaagtttcctaatagttaatcctgaagttttgtctaccagcaagttaatggacagactcaaacatgagacctagttttaaaaagtcataaatctttaaaattaattttgaaagctttggtccacctatcatcttttaatatgaatggttttcaaatagttttaaatagctctgaaacatttttaaaaatcaaactgagccaggtgcagtgatgtgcacccgtagtaccagctactcagaaggctgaagctggaggattgcttgagtgacacctcatctcttaaaaaacaaacaaagaatcaaactgagatgcttgacactgagaacagtatagaaactatgagaaatatatattaggaaagaactatttgaaggttcttgccttctttttgtaaacccagtgactatttaaaggaagtatctcaaactttgaatctgtttctctttgtactctatattagaaaatatgacgatatgaacttcagtaagggattccatccatcctttatcctaaaagaaccattgatattagaggatgttattcactactgtcagaatcaccaaatagcacactattaagttagtccgagtccatcagtggttctataaaaacgacacggccaagatattaaagtgacaaaacccacatttcccaaagaaggcatattttatggaaataaatcatgtagcctgtatatgtaaccaaatgccacttcagcatattcacaagaactagactcaaaagttaagtggtaaatgtcttaacattcaaaatttcgtatggcttctttattactgcgaccttactatgatgaaaatctatttctccttataaccactggaaaggtttctggcacaggtttgatacaaaagcatccctaatcatgaaaccattttaaatgaattttttaaacactgaggctcaataagactttcacagatttaaaaggaaaaagaaagttcaaaactaagtgagacaaattagtccaattacttatacttctcaaactcatcataactaggagggactaattaatagggattgatgagaacagatggagtggcattgctagtcacagcctcttagctggatcagactgcattggttgagacaagcatcacaaaaaaagaagtggtagctgtatttgaaaatgacatgaataccaattgatgaaaggaaactgttttacaaaccaaatcaacttctaactacagattaaattaataacataattaagatcttgataaatcaggcattctaccataaaaccttcaaagcacaaagccataaaaccatttttataaactaattttaatccatcagttgcttcataaagagtttcaataaatatacccactgttctttcttaacatcttatttaaaaataattatagtcacaggaagtttcaaaggaatgtacagagatgtcccacgtacttttccttcagtgtccaatgttaacatctaacaccgctataacataataccaacaaattgagttcaatacgatccatagagcttattcagatttcactagttatttatttttttttgagatggagtttcactctgttgcccaggctggagtgcagtggcgccatctcggctcactgcaacctccacctcccggggtcaagtgattctcctgcctcagcctcccaagtggctgggattacaggcatgtgccaccacgcctggctcatttttctatttttagtacagaagggggtttgccatgttggcctggctggtctgcctgcctcggtcgcccaaagtgctaagattacaggcatgagctaccgtgcctggcctgatttcactggttataaatgcacttgtttgcataattttatctcaggtagtcttgtgttacatggccaccactaacatcaagatacgcaactgtattgctccccacattcctcctctgtaaccactaatcttttgtaactactaatcttttgtaaacaattaataaacaaaaaaaggtcaatccactgttctatgttagccatagtatcaaaagtagatatgttaactattaaggagtagaaaataatcgtgtatgagctttcttttcattttaagtcccaagagaatccaagtagaaatgtaaatgagtgacagcagggaaggtgacaggcagctctgaaggtgatggtgggttgactatcagcaagaagaggggaacaggtatacattttcagtggaggttgagatagctggtatagtgactccaactaaagtagtaaaaggcagtcaatttcccaacagcttcctaaaaatactggattaaattaactaagaccaaaagggtgttatgcaggtaatcataaaggaaaagcaataaattgctttcatttcacagacatgtcatgcagtatatttaaaacatgtgttattaaattcaatatatcatttaacagtaacatgaatcgcttaggcttaaaagtatactatgtactccatttacttttcattgaaatagttggtattgtaggaaaaaagactttaaaaccagaacatatgtatatacatttactaaggacatctaaatgacaccataaatatgagaagctttttctttttttcttttttttgagacagagtctcattctgttgcccaggctggagtgcagtggcaccatcttggctcactgcaagctccacctcccaggttcacgccattctcctgccttagcctcccaagtagctgggactacaggcgcccgccaccacgcccggctaatttttttgtatttttagtagagacagggcttcaccgtgttagccaggatgatctcgatctcctggccttgtgatccgcccacctgggcctcccaaagtgctgggattacaggcttgagccaccacgcccagccagaagcttttccaaaatgcagtgactaaccagaggtaagaaaattaacatcaagttccttaatcacaggcattaataaccatgaaaaacaaaactagtctaattcatttcttaattctctcaaatccaacacttacattcaaattttagaatccagcatccattgagaatcccaagcatacacttcaaggtactttgaactgcatcaccaggaacaacaacatgagttactaaaatacaaaaaaagcagtaagagaaagaaagatacaagccaaagtatttctttggcctgcttcttataactcatctatattttgtaagcttatatctgaatcttcaaaggcaacaatttttacacttaagtgtaagactacttctatttagtatctagttctctaacctggccatcaatatgaaaaatcagatcataaaccatatatcttaaagccatattggcaaacacaaatttttattttcaaattacagctaagggattatgacattacactgcacaacaatttatttgtcactagcaaaagtcacaaatttgctcttctgaaatactgtcttgtcctaaaatatatgcaaacctttaaactttacatttcctaactacgttgttgtctataagtagtttattactgaaaaaaaatttagatgtattacaagatgcaaagtatacagccatctcccaatggttaaaacatatgtaaattatcaaaggtagttctccaaaaggatcatctatttaacattttttctaccccacctcccaaaattcaaaatcctcacctgtactgtcaaactcagtatattttttagccttaagaattactgcaagctcactgagcattttctgttgttctgaagacagcccactgcctataagtacaagaggtccatccctacgctgcccagtgttcatctgttaatataaaaggagataccagtgttaaaaacattagacgactagacaaagacattaaacagactgttacttgatataagcttgaatttcattacttagtttactctaataattttcaattatttccattgaatctacacccagaaccttttaaataaattttttctctttatttttccctcaagaaaatgtcaattgtgatagctctctatacccagggcatctcatttcttcaattttaaattgggtctctctagggttttacttcattcagtcaccagtaagtctttttcttttcccaagtaacttaaaatatccacttaaaatcagcaattccctattccacctccactaacttgtcccaatagagttaaaatcaaacttgtttagtttaaactgagattatctgaaaaatcaaagaatgccaaggcttctagaacagtgctgacctcaaagatagaaaacaaattagcatcaaaatagtaacccctcaaaactaggaaaagataaaaacagacaagttaattcaaaacttaggagatcagatccataaatagtaagaagtccatatagctcacgactaagaaagaagtgctgtaacaaagactaatagtttcactttaaaatctagacttagaattcacagaagacaaaaaagacaaaaataaagagaaggtaagagtggacagcattaaagctgagaagtgaaagactccaggaaacaatatatgtccatatatatatatatttccataaaagtgtttgtaaatgacagaattcagcacttaaaagttcagctcatctttcctagtcactaaattgtaagatgatgtaaccacatctaacctaaacgctataaaccctcctcacatagacctaaaaccattaaaaaccctagaagaaaacgtaggcaataccattcaggacataggcatgggcaaggacttcatgtctaaaacaccaaaagcaatggcaacaaaagccaaaattgacaaatgggatctcattaaactaaagagcttctgcacagcaaaagaaactaccatcagagtgaacaggcaacctacagaatgggagaaaatttttgcaacctactcatctgacaaagggctaatatccaggatctacaatgaactcaaacaaatttacaagaaaaaaacaaacaaccccatcaacaagtgggcgaaggatatgaacagacacttctcaaaagaagacatttatgcagccaaaaaacacatgaaaaaatgctcatcatcactggccatcagagaaatgcaaatcaaaaccacagtgagataccatctcacactagttagaatggctatcattaaaaagtcaggaaacaacaggtgttggagaggatgtggagaaataggaacacttttacactgttagtgggactgtaaactagttcaacctttgtggaagtcagtgtggcgattcctcagggatctagaactggaaataccatttgacccagccatcccattactgggtatatacccaaaggattataaatcgtgctgctataaagacacatgcacacgtatgtttactgcggcactattcacaatagcaaagacttggaaccaacccaaatgtccaacaacgatagactggattaagaaaatgtggcacatatataccatggaatactatgcagccataaaaaaggatgagttcatgtcctttgtagggacatggatgaaactggaaaccatcattctcagcaaactattgcaaggataaaaaaccaaacaccgcatgttctcactcataggtgggaattgaacaatgagaacacatggacacaggaaggggaacatcacactctggggactgttgtggggtggggggaggggggagggatagcattaggagatatacctaatgctaaatgacgagttaatgggtgcagcacaccaacatgacacatgtatacatatgtaacaaacctgcacgttgtgcacatgtaccctaaaacttaaagtataataataataaaataaaataaaataaaataaaaaataaaaaaattaaaaaaggaaaatattcagtgtactttatggattgttcaattactctttgataatatttaaaaacactacagtatttcaaaaattcttaagttacacaaataccataaaaatagctctaaacagaacacattacttctcaatttatataactccacttcagctacattagttctctgcacaaaacacaagagtgaaaaagatatcatttctaaatatagcatatgatactatttctaccaacccaaggaaagcaccaaagtgggtcaagtattttcctatcatacttttaaaaatttgcataaaaaatagaaactggcactaatttctcacagttaaagagtgctataataaaacataaagcaaacagctgccaaagccacatgtctgatttggggtgaggtggcatgggggctggggatttgacttgaataagcataggtctctgacccatgaggctcaaaagaggtacaaaaaacaccccaaaggtttaataccctgattttatagagattagatactatgttcattagcattaaattcaaaggaataattaaatagggtactttttcttagataaaatcattagtttttcttaagttcatcaaaaatggggttaaaaaatctagaaaaaaaattaaaaaggtaaacatgctgcttaaaatgaatcacaaacagagaagtctcaaaatgaatgaatgataaggagttttttaaatttttaaaagattagaggttgcttctcaaagcagatttccaacagccactaaattttacttaaaacataaaaattctaaagagaaaggagagaaattcaaaccccttcctttagggaagcagtgagctgcttccctaaagcagctcactggagatcactgatttaaagggttcccaatgacgctaccaagcacttgtgcttgtttcagaggcaagtatgtatcataaagaatactctaatgttccttcatgcattcagcacacactgaacactcagtatgtgccaaacactgttctcaatgctagggctactatagtaaacagaagagccagcccctgccctcacacagtttatattctagttgagaggggaaaacaacacaagaaaataaaaatacattacatcaaatgagaaatagtatggtacaacacaccaggggaagggggttagacagcactgggaggttgctatttactgtgcagtggcacagagccctctctgctaagacgatgctagagctgggtctgaagggtgtgaggaagctggccatgggaacatctagttcctggaaaaaaaaaaaaaaactaaacaagtggtgctgcacacctgaaatgagagtatgtttggtggactcaagacacagtaaggcagcccatgtgactgaaaaagagtgagtgaagaagagactggtagtggctgggggaaggtatattccagaggttccatctttaaggactgcacattaagaaactaccctttaaacctgaaggacttgatattatcttttccttagccaagtaccaaccattaagacagtaaatagtaaaactcaaaaggccatgtctacatgacatgcccaaagtataggtctcttccatgtaataaaaaccctccttttctgaaaggcactgccacccccagactccaagaataccataaagatatctttattcttgacacatttaaagtaatcattttccagcttttacataaaaggaacatcagcaaaggacaacttggttatgctatgctctgtcagacttcaagtacaaatgaagaaaacaagtcaatttatagttgctgagtacggtgggactgaattgagtaccgacctaagttttaagaaatgtgagttttaactggtccattaataaagaaaaaaacaacctttttttttttttaatggctggttaaccctggggcaaatcatagcctctttaggtctcacttttctcatttgtaaagtgagaaaattaaactgctgatttctagcttctcttccaattcattaccaaaactatagtttggaacagatttataaggctgaagtctaaagcagaagacatagggttttcaagatatgaaagcaactagctcatgaaagcatctatgagagtatcaaactgtagctaccttaggctacctccttatcttaaacaatggcatctactactactcttgtgaatgatccttgacctcagctcctccctttctgttactttcccccatctgagcagtactgggatctggtgagtctaccaactctctctaaaactcttcttcttctctccatccccacataactaccatctataattccagtcctcagcatttcaaacctggtctccactactgcagcctcccaatcagccttcagtctcttcctactcccagctagcctgcagacagtcctatttcagttataaacacactgaaggtaccctattaagtctaaactcgtatcagggaatttaaggcttttcacaatctggtcccaacctaaccctttaccctgaatccctcttaaacacacgtcatactcctctcacagtaaatgctatagtttctcaaattcctaaggtcctttatgcctccttgtctctgagcagctgttccttagatttgggctgccattctcactttgtacacctgactgcagtggggaatgttggctgttacactcaaaatctattgctcacttcctccacactaacagaagcccagttttgttcaggtagcccccctttcaaagactgaccctaacctccagccccaggaggggctgtcaaaatcaatttctgacaataagacacaggggaagtccacggaaaggcttcagggaaagactttagtgtctctttttcagttggccactgtcatatctagaattgtggcaatcattcgacaaccattaaaggaaacttcttagtgaggacaaatcccccaaactgaggatggcaaggtaaagagatacaaagaatttggttccttgatgcaaccactaagtgctaaattaagcaaatgcagagctatcctgcattgggattaattctatataaagtaataaattgtcttcaagcatttgagaaaaggttttctgttactggcagccaacagcattctattagacactctgctaaaatgtttaccctgaaagacttaggacacctttctctgtgaaattctgtgtgtgtgtgtgtgtgtgtgtgtgtgtgtgtgtgtgtatatatatatatatatatatatatatatatatattttttttttttttttttttttttttgagacagtcttgttctgttacccaggatggaatgcagtggcctgatctcggctcactgcaacctttacttcccgggttcaatcaattatcgtgcctcagtctccctagtagctgggactacagacgcataccgccacactcagctaatttttgtatttttcatagagatgggatggggtttcaccatgttgaccaagcaggtctcagactcctgacctcaagtgatccacccgccccagcctcccaaagtgctgggattacaggtgcgatccactgcacctggcctttctgtgaaatttttcctgacatctcctgtagtttctacttactttgattctactgtatatttttatagcttattttacaaatttattacaatgtacagtaaaagtttttatatctgaaatccctgctaagctatgggttcctaagaaacaggcattctttccactttatctctagcttgtacctctctcctaagctccagactttcatatccaattatctattcgatatctccatttcatgttttacagacatcaaattggcacatagaactattgatttccttctccatggcaacaaatggcattaccatctatttccctgctaaggtcatacttattccattcttttcccacacttcatatgtaatctatccgaaagtcccgttttgatgctcgctagtctccagcaataacaaacttctttctaaccttccaacataccagcctcattcactgaagggcctatacactgtgtcctccagatagtcacctggcagcctcctcacttcaacattcaggcttcaattcaaatcagtgctttaaggctccactctgtgaccctagctaaagcaatggccttgcagaagcccactacctccacccaacgacactctacaacatcttcgaaacactcatgtctaagtgtctgaaattattttatttatattagttcaatatttacagtttgtctctttcctacctctcaccagatggtaagctcctccctgagaataagagttctaccagtcatattcattgttttatgaatgctgcctaaaatacagagtgggctcaataagtatttctagatggtcgtactgtgattatgtctttgaatccacagtagctaatactcaggaagtgctcaataattgtttggtgaatgtaagcaattggtcaaatggaaatttttctattatgttcctttcataaccaattttaataaaatatataaatgtcccaaagctaaatccatacttactactgagcagtggctagctgaggatgattcattcttctctggtagcagcaatagcgatttcatactttcatcatctgtataatcgacaggccgcagaccaaatatattactggtaaaataagtgcagatgtgtttaagtaagtcaaatgtgtgactcgactcaatttttcaacatccttaataatatacaattttaactaaaataaattactcagaactcatattaggcagaagaatctagaatcaaaagctgctgaactcaaaggagaaatgatgtaaaatttcagtttgacatcagattatagggattgtttttactgaatatagtattatgaatttttcacaactgtattctgcattcttattcatattaaaatatggcttcataatcaccaatcactataagtgacagactttcaaatgccaataaaaatcatttactatagctattataggccatatagtctttataaaccaataaaaaattagataaattcacaggacagggattttgttctactagaaggaaaattatgccacataacaaacagtttaataatatagttaacagggtactttaaaaattaatttaaacatgtgtgcatacaataacctataataatcacaaccatcgcagaacaaagtattatggctcagagagatacaaacttctcagcatgtactaattcacaagtcacagaatgttacgctggaagagattttagagatcccagtttgatcctgttcaagataagaaaaaaaagagagaagaacaagttccaatggcttaactaaggtcatattctccttgttcaatttcactgaaattaaatattgcccagcctaaagtctttcaattataagtaacttgttaaaactaaaggacttctgtctactattctgtttccttacatatggtttcagaatatgatttaaatacactataccatggcaagaagttttcaaaatgagcaattcttttatagtcttctatgttttttttaaagattatgctatattcatataatggccacagaagtccatgtgaaaatccaatgcagtaaatgggacatgaagttataaacatggtataatactaattctgtaaattgtatcaaatgtatagaaaaagatctggaaggaaacagagagaaacattaggggaagtgaaaggtagaaaaatgccaattccgtttgatgctgcagagagagatcatgtagatgagggatataagcatctactgagttcacagacaaggtcactaatgaccttggtgaaaactgttttgatggcagagtgggaaaagaaagctaatgtattagaataagaaatgaaccacagcaaatgtttctctaatgactgcaattcgtgactatcaggtccaattgctttcttctttggacagtcctgggtaaacactgacaagtttgtattctgactcttctttatgtccaagtccaacaaccttcctctggcaacagtctttctccagccaagatataatacagcggattgcatttcagctttataatttaaaacaaagtgacacatgtcacagtatacatttacagcagacaatctcagggtattttaaaagaaactcatccactattcttgatacttcctaattcattctctaaattattatgctcatataccaactacacaatctcctcacccacatatgctatacatatgacaatcaaaaaatagaaatctgagttgaagaaccaatgttctaggtcttaaaccaccaagtgcaaaaatgaataaacaaaacaacaacaacatataatggccacattatatgccatccaaaaaaaaaaatcataactgcatagccatgattgcaccatggtactccagcctgagcaagagatactgtttcaacaaaaaaagaaaaaatgagaaaaaaaaaaatccatgcatacactaggactttttgacagagacaaacatagaccttacacctcaaaaaaataaaatctaagagcccaatcaagtgcactttaatgcacagcaactgaatcacattagcatagttattttacacatatttgaaaaaaagtgcatgatgacaacatgaaaaactgttcaagtgcttctcaaagtaccaccatcagctagggaggaatataaaccaaaaatcagccagtaaaacatggtctaagccagtaagatgattttacaaagtgactaccagagttccaatttacatttaggatccttactatacaaagcttactatgtcatatggtcttaaaacatgtggtttctctgcttggattatggatggcttctgctcacacacaattcactaaactcttagccctcctgtaacgctaatgaactgaatggcacattacaagtgctacagatggaaagataatcagtttacctcagtcctgcatcatgggaaatagagcctattaaatccagtcatgttgcttctgctttgtcatgaaccattaaaatttggaagtagatgtaagtttacatgtgggacgttcaaagaccatagcaagagaagatggggcatgtgtaagatttcttattatttgggcacaataatgtgtgctttcttcccactgatgtattttaacagactaacactttagttagagaattagtgtgaaaaatcaatttaaaatacacagaggtggattttattcccattgtaaaactaataggtactacatacaggaaaagttatgttgaaatgtatctcaggaactattaacatgacttattactaaatagagaagtcagtgataaatacattattcttcatcactatacaagggaagaagactcttttttagatttactacatcatggactcaaaacagacatcaataacttgatttgatatttattagaatgggttactggggaagcttataaaatggctttttctaaatacacttaaatatagtaaattctctcttttctagcatgatttaacctaaagttttaccaaactaggtgttttggagggacacataagacttagaaaaacactgtccttgcctataatcctactgaggataaacgttcattcaacaaacaggtatcaaactgataaagtataaacccaaacaagtaatgaggtgaaatagaagataagatttaaatggccttgatcccaggactagaaactggaatatggtggttaactgttaaggggccgtgtagggaataagcaacatgattactgaaatggatgcaactgatggaagaaagctttctatcaaaccttctaggcactgtgtgctcatgtgtagaaaccaaacacagtatgaaaaaccaatgaaaaaatcagatataaagcaatgaacattacagacacaaagcgtatgttgctgtgaaaatggaaaggcacatgtgtctactagctaaatgacatgggtcaatgcaacaccaaaatatttaaaactattttggaatatatgaaaatgtcgagatcttaactgctgaatttacatctagtacacgacagtatattaatatcttttacatgtaccactttcgacagtcagttcttttaatgccttatcaacggacagtcgcgaattcagtgaattgaaaatgattatatgtagataatatactttacctatactgataaggtttctatttgtgtccccgcccaaatctcatgtcaaattataattcccaatgctggaggtggggcctggtgggaagtgactggatcatgggggcggatttcctccttgctgttcttgtgatagtgattgagtcctcaccagatctggttgtttaaaagggtgtagcactaatgaccaggaaaatgcaaatcaaaaccatattgataccaccttactcctgcaagaatgggcataattaaaaaataaaaaaataacagatgttggcatagatgtggtaaacagggaacacttctacactgttggtggaaatgtaaactagtacaaccactatggaaaacagtggagattccttaaagaactaaaagtagagctaccatttgatccagcaatcccactactgggtgtctacccagaggaaaagaagtcatgatatgaaaaagatacatgcacatgcatgtttatagcagcacaatttgcaactgcaaaaatgtggaaccaacccaaatgcccatcaatcaatgagtggataaagaaactgtggtgtatatatacaatagaataccactcagccataaaaatgaatgaactaatggcattcacagcaacctggatgggactggagactattattctaggtgacgtaactcaggagggaaaatcaaacattgtatgttctcattcataagtggaagctaagctatggggatgcaaaggcataagaatgacacaacagacttcacggactcaaggggaaaaggtgggaaggtggtgaaggataaaagactacaaactgggttcagtgtgtactgctcgggtgatgggtacaccacaatctcacaaatcaccactaaaaaacttacttgtgtaaccaaataccacttgttcccaaaaacctatggaaataaaaaaattataataaataaataaattaaaaggctgcagcacctcctcgcctcttcctcctgctctgaccacgtaagatgtgcctgcttccccttcatctcccaccatgactgtaagtttcctgaggcccttcctgtatagcctggggagccatgagccaattaaacctcttttccttataaattacccagtctcaggtgtttcacagcagtatgaaaagggactaatacatatactgaatcctaaaaattcaaaggctctaattttttttctgttccttgacaacacagtacactggcagatttcaccagttttttttttttctaatgtactcttgcgctattcctttacctatgattttaaatcataatgtggaaaatatgctttataaaatctttaaagatatgactggagattttacattttaaaatcttgaacagacaatccaggtgttcatgtgtcattgctttttgctatctaaaatgtagtatgaaatactggatgatttgttactgatgttgatagaacctatgtgaaaatggatatatgtattaatatacataatgcatgatatatatattgcatatatcagaagtagcaataatcgtttatttatttaacacacatggaatgaatatatttgtataaacaagtagggggaaaagtcacaaactctgttttgcaattagtttggaaaatagtcatcattcagcaaatactttgaaaaaaatgtaccaacaacttttggcactatagaaacaatgtcctcacagaactcagaggaggaaagcagagaggcacacagaaaaggttttgcagtctggtaaagctccccagacctgaaagggtaaggaagaaaagcgggtacacaaacagaataagaatatcctagcagacagaaaagtgtgtgaaggactttaagtgagatagcacttagaactttttagaaccaccaaaaaaaaggaaaaaagggggtaaagggagagtgagagaaagagagggaatgtaccacaggaatatgaggtactctcgaactgtaagctatggtcagattatataagaacaaagaggaggtgttaaagagttggacttcctcccaaaggcaataagaaaccctgaacagcttcctaaatcattgtaagcaggagggatggcatcaacgtagcatggtagttaagagttggggttaccgaataagactgcctgaacttacatttcagccctgccactcaaaagtcttatgactttacacgaattacttaaatcccgtgcctgtttcctcatttataagatggaaataataacactatctattttacaggattgttgccagaatcaaatgaatacatcaaaagcatttaaaacagtacctagcatatatgaacagctcaataactgccattatattactgtattggatttgcatttttggaagacagatacagaatgaagataagggcacaaaataagttatgtctggagcattaacctcatatcttcattttccccaattttatgatacaattgatgcatgtttttcatgataatctggaagtttactaagggaaagtatagaattatgtcttcttaacaacattctaagagtagattttcattttcccatgtggcactatctaaagagtatgaaccacataactctgaaaatccttttcctaactaggaatccttctgatcctgaagatgaggaaaaggaagtacttatgaaagggctaaactgtggtgttcaatgtttcagttttgtcccaaaggccacattcaggatgcagtataaccttttaatatccttttcccctcagtaataatatggcagacacctgcctacaatggtgatctgaattcattacaccactaataaaagagagaaaggagagatgggcaaatttaaacttgtacttgcatgtacagaccatccaaactgcaaaaacatatgcaaaaaggcatttttactaatactaaatctatcacgcatgacaggataccaagagagttcatgaatgaaacccttcatgaataactacaaaactgcaaacatatagatttaatttttcaagtcactttgcttgctatggagcaggataaagcagagtaattcaaactagcaacatgggtttttaaagctataaaacataaattatctctggcaattaattttttaaaattaacctagggcagtgggacaattaataggtccaatggtccatgtaatattttctacttcagaattcaacatccttccaaggaaaactgttaatggcagatcaagtaccacattctaaaatcctacatatccattaaaaataaaaaaaaagaagcacatgttattcgccacacactcaaaatggttctcatgtgaccgtaagagctgtggttctagcttcacactgggatgtacagagggcagtggggaagacagattaccaatgatgttttgaacagttataaatactcccagacaacaaagattataaatctttttttcatgatctagggttaaaacagaactgactttcttattgttttagctcacaaaaggtactttttttatgcaaaaaaaaattaagggttaaatgacttaatactgttatttaaatgcaagacatataaaaacagtaagttgccagaatattagagttaaatcaaaacaaaagagaaagtatgaagtagatatatgactttccactgtacattcgaatcctccataattataaagatttagggcccaaaaacattgcagtaggaaaattaataaagaacacagcctctatgggaaaaaataggattgggagacttcactggtgaactataaaagctcatttaatttaaaattaaatagtgaagatggcaaataaagagtatcattgactttaaattcataccacaatatggttaattcttagctattttgccttgccttataaggtttcaagatttccctccaccaatattcaataggacgcttttaaattcacttggctttgcagcagataatactccattctttttcctatgtctagtcttccacacacattcaatgtctaacttatatgactgagttggttactgtccccacttcctgggctacaaaaaaagctctcagttatctttatattttatatgtcactactgaaaaggtacttcttaagcctggtctccaatatttaaagtcacatcttacttagcaccattcatgatacattattattattatttgagaccgagtctcgctctgtcccccaggttggagggtggtggcacgatctcggcttactgcaacctccgcttcccaggttcaagcgattcttgtgcctcagcctcccgagtagctgggactacaggcacacgccgccacacccggctaatttttgtatttttagtagagatggggtttcaccatgttggctaggctagtctcgaactcctgacctcaagtgatccacccgcctcggcctcccaaagtgttgggattacaggcatgaggcactgcgccaggcccataacttattaataatgccagaacatgtatcaggataaaacctggattacttagccctcttatacaagccttcctctctcccagtgacatccgagactaactctatggctggattttgtcttagtttttcttctctctcctagggctgcattacaaaaatatttactcttctaattcaaactaatattcttacagtaacaggaaagttataaagttaatcaaaatcacagcctcagataaaacgtcaaaataggtaaaagttttacagttcacagggacttttttcttttttttttttttagatggagtctcgctctgtcgcccaggctggagtgcagtggtgcggtctcggctcactgcaacctccgcctcccgggttcacaccattctcctgcctcagcctcccgagtagctgggactacaggcgcccaccaccacgcccagctaattttttgtatttttagtagagacggggtttcaccgtgttagccagaatggtctcgatctcctgacctcgggatccacccgccttggcttctcaatccacagggactttttaaggatgaacttgatgggataaaaaaaaaaagtccattttctctttagtgtctgtattttattatgaatacactggtctatcagagtgattactactaataacaaaactagagagatctccaaaaattatataatatgtgagttatcaaaatagatactgttatgctaagttggcagggggcaggatatttccagaagacattctattcatgttccagagaagaggaaaggtaaaaagaaaaaaaaaaaaagcattctgattactttttagaaactatgagtataattttggtatcaaaatccgaggcaaaaaaatgaaagataaaaatcacaaatcactctaacttataatcataaatgcaaaattcctaaaaccctagcaaattcatgtaaaatttgtgtttaaatgatgcacaacaccaagtcaaggttatcccaggaatacaagcattatttaatatttttaaatgtattaacaacatcaatagtcaaaaaagcataagctttgggaggctgaggtgggaggatcgcttgagccctggagttcaagaccagcttgggcaacacagtgagaccctatctcaaaaacaaaaacaaaaaaagtataagatcatctctgcagaagctgaaaatcattcaataaaataaaatacagtcttgttagaaaataataaagggaagaaagcttccacagggcaataaagaacattaatctttgtatttaatatggatattagtattgactataactctatgggtcagtacttttttaaaaaaggaagaacaaaacaagcaagccaactatcatcattattgcatcattctggaagcactgacaaatgcaataagaaatagaagttaataaatgataattagatctttagaattaggtgttgactggatagaaacgtactaaatcaacagctctcctatatatcaagaataacaaattatatttattaacacaatatccagtttactagcaacaaataatcaaatactatacaggttgagcattgctaatccaaaaatctgaaatttgcaacgctccaaaattggaaactttttgagcaccaatatgacacaagcggaaaattccaaacacagtacttaaaaaaccattttaatgcataaaattgtttaaaatattgtataaaattaccttcaggctatgtgtataaaatgtttatgaaacacagataaatttcacatttagtcttgagaaccatccctaagacatctcattacgtatatgcaaatattccaaaatctgaaagaaatcccaaatacttctgatcccaagcattttgggcaagggatactcagtctataactagaataacctcaattaataggtatatgcatgtgtatacctacatacatatatatgaaacagactaaaaactttactaagatatatataacagaatgcttaaacaaatggagacatgcagcttggtcctgattactttttagaagctatgagtctaactttgatatcaaaatctaccgacaagaagtgaaagataaaatcacaaatcactctaacttttaaaatgcaaaattcctaaacaaaaacctagcaaactgatgtattcatttaaagaataacacacgacataaagtttatcaatcgacttgatagaaaccaactttattaatccactgtatatacttaccaatttcaatcaacatcctaatcggtactccactagaatctatgtacgtacccaacttcaaaacatcctaatatggtatttttgaaacagtacaaagtaaatcaaacttcatttgaaagaataaattaataaatatggctaattctccaccccacccccctcccaccactactgtcactactttgatttgactctcatcactcctttcctggattactggacaaacctcttaactgagttccctccccagtgtgaaggaggaggttttcaacttaaaatcagcactctgtttagcacacacagcctttcaaagaccctgcccatcttctctggcctctcatcctcctccatccttttattccacttacatcactaacggaagttcctagaatgaatgaagaagcagtctggccttgagtaccttagcacccatatcttatctttctcaaaatcccatcctcccgttctattttttcaaaactcgaagttcttcttcttccagaaagccttctgtgacttcctctggtcttactttcagccctagctgagactttcatactactgtgagcaccgtgctatgaaggcatacctcacaccattctataatcagtgctttaacagactgttcactgttcactcctactagaacagaagcaggcagacaactgaggggatgatgaggcaaaggagcaatggagggactatgagaagacttaagaagaaaggaaggcatctaagagaaaacttcaaccttgaggtcatgaagaacacagccaaaatgtctatgctagagctaaaggaggccacttagaaatttacagtaagcaaaaaggactttacttcttcaatcagccaaagtagcaaaccctaaagagggtcagacagaatggtgtttgcccttgctggttcttacccttcttccatgggaagagttcaggcctggttattgagaaaagagttccagcaagagtaagagatacagtaagcagagacagaaaaagtttgtttgccaactcagattccagaatttgagatgttaatggtttataaggagtaagagcttcaggaagaaatagaagagtagtaagaatcccatagtctccatgctccagacccccttcccatgatctccttaagaaatggaggaaagggcaggaataaatttcatctattctcacctgttactacctaattctagaagacagtctctagaacattgagacagcatgcacttaaaagtcaaggctataggaattactttgggtagccacaatcccacaaaaagtaacatgccatggatgccaattgggcaaaagctgccaggaaccagttcaaccaccttagaaaaggcacagatatgggaaacttggttttagacatcttgtcacacagtaaaggtagtggcagaaggaggcaattcccattttcatgtcatctgaccttttatcaaaaaagaggaaaaagtataccataatcttcattcattcaaacactaattcactctacaaacaaatgtggatacagactacattaggcacttggcagaactagggagggcagacatgatccctggcccatacagcttacagcctcacgagaagggaggaaacagtaagtcctacgactggggagaagtaccacatcaggaaaggtggccaaaaggacaggataacccaggtgaaacccaaatgagaaactggctaccaaaaacaaatattctagacaatgcaaagacatgtacaaaggctaggaggtaaaagaccctacatattttaaggaaacaaaaattcagaaaagctggtgcaaaaaatgcttgaaggaaagggggaaaggagaagctgtgaagaccgatgagaacagagaggaaagtagcaccagaccatccagggtcttataaaccatattttgggatttaacctttattttaaaaacattaagaggaagccacggaaggattttaagcaaataaatgacttggccagactcgtgttcttctgcaggtgctctggctgcaggatggagagtgaataaagaaaagtaacctgaaaaggaggagaacagtcaggaaatttgtaaagccaatcagatgaacaacaatgactacgacatgtttttaagaggcaaaaaacacaggaaaaaagtatgaagaccaatagtctggaaaggaaatttttagaaacagccaccatactcttgtaccctaggattaaatctgtcccttcatctgccctactatcctttatccaatatcaatcccaacctcttgggtgaaataaaccctacttcccaactgcccagctgtatcaaccagctgtccaacacagtagtcactggcacatatggttaaaataaaatacattttaaaatttattccttggtagcaatagctaattttcaagtgttcaatagtaaaggtgactagtggctactgaatgtccagcatagatataaacatttccaccaccacagaaaggtctactggacagtgctgaggaacagatatacctaaatttgccacttcactaggtagtcctacttaaaccaacactgaaggcacctgtgaaggcagactcactcactgtctcatgccactccttgtatattaataagccctcacagtgcagtgacgaatcatggtgtacaaaccacaagacaggctctgtgttttggctcattaatcctcactatgctctgaagaaatagaaatgcagcaggcatcacccatgttttataggtgaggacaccaaggcacagaaattaacctgcctgaagctatacagtcagtaatggagtcacaaataaaagctagattccctaacgccctgaccagtgctccatccattaaagtagtcatggctgatttaagaaccctagaatgaaaactagtcagtttcacctgacccaagcaataatttgcgttaccaaatagcttgcaacacatatgggagggtcatatcggttaggtccttacaaagaaataggtccatgtatatggagacacacacaaacacgcacgtgtgtacacacacacacacacacaaataaaaaccggaagaatatacacatcccctgaatttgccccaattatcttataacctgtgatgagagataaaagagattagacacatttactgaaactaacagcaccaaggtatggtacattcttgcattattaatttggttttcaattatgttaaataattaccaataaaaaattacgacctagaagccctgcattttataattcttatttgcatctgttaccattgaaaacttaatttttttgtgcccttttcaaacctatagaagcaacaagggcagagacgcaatacctgcattttcatttcaactacttaattaactgaaaagaataaaatactacatagggagacatgaaccaagttacagattaaagatacaaaatctacatacagcatttgcttgtgacactcttgacaatgccaattttaaaatccagctgctggcattcactaatgcatctctgtgtcctgacactgcaaaaagttcacccagaacctcatgtgaatgatgtaaaaaatttaagaaataattcaactgccccggcccaatatttaaattcttatatgctttacctgttgtaatagtaaatacacagaaaaaataaaatgggaatgaaatatttaaaataattccaaactattaggaagcatacaaaataattatttctacaataactgcttattaaagtgtaaatcaatctacagaatataaacactaagtaaatttttccattaaatgaaagcttccaaaattgacaactgtttctgaattaagaaagtaaatctcccccaaatatgtcagcacagttatccccattgctatccatggggaattggttcctcaacccgtgatgtcaaaatgtgccgctgctcaagtttcttataaaagatggcatagtatttacttgtaaactacacacatcctcccgtatactttaaatcatctccagattacttgtaatacctaatagtatgaaatgctgtataaatatttatactatattgttttacctatattacttattatcgtagtgttattttttttcccctttttaaacttttattctaggtttttatttaagttgtgaaggtttgttatataggtaaacttgtgtaacgggggtgtgttgtacagattatttcaccacccaggtattgagcctagtacctaatagttactttttctgctcctctccctcctcccatcctccacactcaagtagactctggtgtctgttgttcccttctttgtgttcatgaattctcatcatttagctctcacttataagtgagaacatgcggtatttggttttctgttcatgcgttagtttactaaggataatggcctccagctccatcatgtgcccacaaaaaaacatgatctcattcttttttgtagttgcatagtattccatggtatatatgtaacacattttttttatccgatctgtcattgatatttcccaattatttttgatctgcagttggctgaatcctcaagtgtagaacccaagaatatgaaggaccaactgtatcataaaaagggcatgaaggctgattatgagtgcagaatgtgatgatcacatctaattttagttgtgaaagtgaagaaagccatcaacttgactattttaaagtctgctttatcacacaccttgattcaagaatataggtccattttaaaaataatttttacgttgaactacttacacagcatttctggaggctccataggaaagtaacagcttgactatatccacatgcccattcttggctgcatcgtgaagtggtgagtcattttgatacccggtggtgttcaccaatgccttatgctggagcaataattccactaccttcaggtgcccatgattgcaagcttcatgctaattaaattttttgaaaaagaagtgaaagaagtgataagaaagagcaatggatgatattataatatcacactttagaaaaataaatgtaaacgtcaggcagtaaatttattgttacctaaatactcaaaaacactataagttgctgacagagtgaaagttactattaataatctttcaatcaagatctgtgtaactcataaaaaaagaaaggctattctcatttgagccttgggtcaagcacttttctgttttttagaagaaaatgtagttttaaaccaacggtagctccttaaatgttctacaataaatgtaacacattaagaaaaaagtctacatatttaataacaagatgatacataaaatctgtaccagtacatacacatatcatgcaacaaagtaagtatccgtgaaggaatgcttttaagataagctatttgctgaacctacaaattgctgtatggctgctgttattgataagagaaataacacgagtaggaatacaaaaagagcttgctgaatgacagaaacggcaacaatggagtgttcaaagatgccttacatccaaatctttccttatgtctaatgaactataaacaatgctgtattctaataaatctctggcattctatactttttaagtacatcaatttcaattcataataagtgatatcacactcaacatctgtaggtctatttttaggagaaaggaatccaaactaggcactaaaccctctaaatcactaaccaatctttactacaacttgccttagtggctttgaagaaaaaaataaaattaacctttctttgaaaaggttagccagccagtagagtccaaccagcaaagcgactgatctagactaaactctcccagctttcttgcacctagcctactgagagtctcctaatttctgggctgaatttctagttacaggatgaaggcatccacttcatttgctgacacttctgtggctgcattcaaatctcatgtttgtcctaatgtaattggcctacataccaattgtttccaagtatttgtgtcattctgtttccagattatgcttcacacttttttagtaataataagcaaagacctttaaaaatgtttaatgtaagcaaagatttctactgccttatatatctacaattggatagggtataagtgaggctaagatagaccctcagtgagaattacttccttgtgatcactttcctatactcagttcctccgacctctttttgttccaagaaatttggttccagtgacatgcagtgctacagaatggagcctgatgtcagctgtagctgttacctctagacattagctaaattctgcagtacagtacaaatggattcctaaatctaaaggtagtctgtcaaaaggtaaccaatttcttgcctgtcacaaatgaaaagctagaaggaaagtaatcatgttctcatacttgatgaaaacataagttcttcagactaaaaagagtatatgtggcagaggatgatatatagacaactacataactataaactataagaactgtaaaacacagaaagaatgagaataaaaaccagacaactaccaatggtgtccatccagcatggtctttaacatttggatcacttccattttgtaaaaggtattcaacagaaggtatgtcgccctagaaaaatgaacaaaacggaaattaaaaagcattaaggaaagaaaggaaaatattgagcttttttaaatgctgccttcttcaatataaagtaaaacttaaatcgttttctcttaaggctactgttcatgagttaataaattattaggccgggtgtggtggctcacgcctgtaatcccaacactttgagaggccaaggtgggtggatcacctgaggtcaggagtttgagaccagcctggtcaacatggtgaaaccccgtctctactaaaaatacaaaactagtcgggcatggtggtgccagcctgtaatcccagctacttgggaggctgaggcaggagaatcacttgagcccaggaggcagaggttgcagtgagccaagatcatgtcactgcactccagcctgggccacagagcaagactccgtctcaaaaaaacaaaacaaaaaagaaattgtctgcgtataaattattctgagatatcaagaagtacagtcatgcttgaatatagactacaaaatctattagaaagccatattcaaaattcatttcaggtaccaaataaaggacactggccaaagatcatgtgctcacaatgaagttttaaaagccataatttcacttgtgaaaaaaacaatttttgagcatttgtaaatggcttctgagtattgtttaaaacaaccaaaactgtttagcccagaagactactcagtgaaaccaaagttaaaaaacagccaaaaactgccattttattggcagttactccatcctaatacatttagtttatattcaccttatttgttcaacattttctaggaagcaacagttgctctgtttaaaatggcaaaaaaagagatcagtacaaacctattcaaatcagcccacagaattagcattaaattttttatccccctgctccccgcccagttcaagactaaaatcaccacccattatcaactaattcaactatacgaaatagagcttctgtaatgtagccttacaagtcttttctaacaagtggttttcaatttctctatttctctattccagtactctggagagctatgcaacaatgttataacagtagcaacagtagcacactgatgcaatggagaaggcagatgaggaatagtaagaaatacaataactttactttagaaatcacaacctctttttaaatcagatgagcaagatccggggaataagtgaattaaaatgaggcacaaggcaaggaaaatactctgaaggcagacaatattaattcgactttcatattaagacaccgtcaattattaaatagcattaaaattgaagaccccttccagttttgaactttctgtgtcttgtgtgtcatgatccaactaaatcctactataaatgagtagacttttaaggtcactttaaagctgtcttgaagtaagacaaaaaaaatagcttccctctgctgccagcctccagcgaaggtagactgtggcaaaggagttctggggaactggtctcaggtagtctgccctcccactcttcttttttattttcctagaagtgagagataataatcctccagctatctaataccagggtctcttaaatttggcccttcatgtaatgtggaaagatctgacatctatcatttatatttaattacatattacgttttaagtatccgttaactcttaaagcctttttaaaaatctctagctgtaatataaaggatactgtccctttgtaaaacaatgtcaggctttaggaagaaggaggcatttatgcagcgggatgaaggtaaaaattttcttgaaattacattattatcaccactcactgcaaatataactaatcagttcttttaggataacagggcagggtacagtacctaagtccatgacgataaagcaaaaatatctagcagagcatactctcaaaaaagaccaaataaaaagctatagacagaagttacatgcataacattgtgttcaatgagtttcgtgagtgcttctttagtgaataaatctctccccacccaacccctctcccaatacttttttctgaaatttttttcctctgttggtttgataatgtagaaatcactaattctcctaaatataatatttgatttttttttctttttaaaaaattttgctggccagacgtggtggctcacacctgtaatcccagcactttgggaggctgaggcaggcaaatcatgaggtcaggagtttgagatcagcctagccaacatggtgaaatcccgtctctcctaaaaacacaaaaattagccaggcatggtggtacacgcctgtaatcctagctactcaggaggctgagacaggagaactgcttgaacccaggaggcggaggttgcagtgagttgagatcacaccactgcactccagcctgggcgacagagcgagactctacctcagaaaaaaaaaaaatgctttttatatctaattgtctctgtttctgtgctctgggctgtttctcaaatcttcagttttctaaaaaagtaaattctcatgcaacatacatttttatattcctaaattaacaaaatgaccttaaatgctcaatgggtctaaaaggattgtaggtttcaaattaattaccccagtttcaggaaaaaaaaaaaaaaaaaaagcaacattttcccagatttcttaacagtgcaaattctacttctagagcaagttatcatgtatttagcaactggagtgcaatggcatgatcatagctcactgtaacttcaagctcctgggcccaagcaattctcctgcctcagcctcagcagtatgctactgctaggcatacatcaccatgcccagctaattttttttattgttttgtagagatgggggtctcactatgttgcccaaactaatggactcaagcaatctcctgccttagcttccaaaattattgggattacaggtgtgagcccctgcaacttttgctttatattcataacggttacaaatgaatgcaggaatatctgccaagatacaaatttttttttccaaaacaatcctgtaacaagtgagcagataaactgccagaaccacacacattccctatctttaacatgaaagtactcacacacaaaaaccttctcaaagatttccccattctaattctacatggtaatgcaaaaaaaaaatattaaagaagcttaaaaaataatataaacacaattgtgaaatggaagagtctcaagggaatagtcaaacagaaacggagtgacaatttaaagaatacaagtagactctcttttaaggttgttagacagttgctatttttctttcatgtcacctcttcatattatcaaagtgtcttctgttaacattctccccacccctgaactgtatagctgattagcaaacggcttgctttttataaccaatctgctttctcctctctagtacttgaaagttttgtcatattttcatctttctacttcatgtaaatgtaatgtcatgcgcataaataaaattatgataattagatagagtctacagtaactggaatagcttgaactgatatgaagtagccaggaaataaattaagttttgattctggcttctttaaattactttcaagtactcacttttgggctcctcacaacttgaaagaataattgaacttttcttaaaccacagcaaacataatttatctaaggaaagtatttgccaaggcttattaaaaattttaaatgaatttggtattttcaagtaatacactgaaggctgaaaataagagtgtgtgtgtgtcccactgaatcttttattcctaatctttcaatcaaaggaaagatccttcacacatttgtacatactgcagatccacacatattccaacaatataaattaactttccaaaaacacacacataaaaacaaaacttttccttattataaatgttagctcttctaaaataccattaataaacatattcataaaaacaatacagaacgttacaattaagtataagacaaatgacttgcctagcatggttaagcctttccatgtaaatgaaccgaccaggaaccaaagacttcccttcttggcaattagatgccattaaaacaaacaaacaaaaatgaaccaactggaatgaagctctaaaatatgttaaatatttctgtagcttcttagaatttactgaataaaatacaggcatatctcggagatactgtcagttcagttccaggtcactgcgataaagcaaatattgcaataaaacaagtcacacgaatcttctggtttcccagcacatataaaagttatatgtgcactatactgtagtctactaagtgtgcaatagcattatgttttttaaaaaaaatgaacagaccttaattgaaaataactttattgctaaaaaatggtgacaattgttttgctggtggatggtcttgccttgatgctgctggctgctgactgagcaagcaggtagttgctgaaggtttgggtggttgtgacagtttcttaaatcaggacaatgaagtatgccacatccactgacatttcatgaaagatttatctgtagcatgtgacgctgtttggtagcattttatctgcgtagaacttctcccaagattggagccaatcctctcaaaccctgctgctgttttatcaactaagatgatataattttctaaatcctttgttgtcatttcaacagtgttcacaacatcttcaccagaagtagattccatctgcagaaaccactttctttctcatctataacaaacaacgcctcatccattgaagtttgatcatgaggctgcagcaattcagttacgtcttcaggctccacttctaattctagttatcttgctatttctactacatctatagttactttctccacttaagttctgaacctctcaaagtcatccatgaaaactgtaatcaactcttttccaaactactgttaatgttaacatttggacatcctcccatgaatcatcaatgatattaatggcatctagaatggtgagtcatttccagaatcatctgtggaatacccatctacaacagctatagccttacaaaatgcttaagtaacaagacttgaaagtaaagttactccttgatccatgggctacagaattgatgttttgttgggagacatgaaaacagcattaatgtccttatcttcatcagaacacttgggtgactaggtggcactgtcaattagtaatattttgaatatctttcctgaacagtaggtctcaacagcaggcttaaaatatttagcaaaccatgctgtcaagatgtgctcccacccaggctttgttgttctaaatggtaaatgagcattggcttccacttcaagtcaccagctgcattagcccctaacaagaaagcctgtcctttgaagccaggcattgacttctcctttctagctatgaaagacacagatggcatattcttccaacaaaaggctgtttcaacttcactgaaatctgttgtttagtgtgccactctcataattatcttggctagatcttctggataacctgctgcagtttctccatcagcacctgctgtttcaacttgcattgttatattatggagacagcttttttccttcaacttcatgaaccaacctctgctagcttccaacttttcttctgcagcttcctcacctctctcagtcttcacagaattgaagagatttaggatcttgctctggagtagggttttgcttaaggaaatgtggttggtttgatcatctatccagaccattccaactctcctcatatcggcagtaaggcggttatgctttcttctcatctcatttgtgtattcaacagggtagctcttttaaattacttaaagaattttttctttgcattcacaaattggctgtttggcaagagacctagcttttggcctatctcaactttcaacatgccttcctcactcatcatttctagcttcttatataaagtaagagatgagtgactcttccttccacttgaaaactcagaggacattgtagggttgttagtttacctaaattcaatattcttgtgtcccaggaaacagggattcaaagggagagagatgggagaattatcagtaagcagaatagtcagaaaagacatttatcaattaagtttgccatgttacatggccagggtttgtggtgccccaaagcaattacaatagttacatcaaagatcactgatcacaaatcaccgtaacagatacaacaatagtgaaaatatctgaaatattgtgagaattaccaaaatgtgacacagagacacactgagcataggctgttggaaaaacagcactgacagacttgctcaatgcaggattgccaaaaaacacaaaaacaaaactctctgcgaagcataaaaaagtgaagtgcaattaaatgaggtatgcctgtaatttaacagataattctgataacctggtcaatggcacaataagttactggtattacaaaagcagacttatacatatgtggtgagtgacagaggagaaaaatagatactgactccaggaggtgttttagaaattaaactcttgaaaatatcacatatgccaaggctgcttttgtttcctttgctaccttctcatgaagctactatgaaggatatataatttcacacacaatataacatgactgtcttcaagtataataaactacaaagttaaactctaaatgagactcctcacaagggatcttctctctctccaggggatcttcatcacctttgttatgttctaagcataccatgccttgtaagttgcattcaaaacattatctattatgtctacatcactaataaatcatggcatgccagcttcaagccattcttctattccacagtaagtcattgctgtggcataaattatgagtagtcattgccattttaagaatttgtgctagagaacttggtagaagggtgtgggggaagaaaaggggaaggtcaggatggcacaaattctcaagcaaagctgacataatagaaaataaaaaattttctctatatccttagtattttgttttctattgggttggtgcaaaagtaattgtggtaataaatcagaagaataaacaatgagtatcttagtttctacttacgcacaaagctttctcataaactctcccattcatgacacagtgttctcaatagcagtttaacatagctgatgcagacattcaaataggaacatgagttatgaagatattcaaataggaagaggggtataaaaaagacttactgataggagagcagagaaatgataattttgatttcggtcagattactctggctgttacatagagaactgactgcaggaaatacaaagggaaattaggaagctacttcagtggtgtggtcaaaaaattacgacctccaaaaatgtccacacacgaataatccccagaacctgtgactatgttaccttacgtggtgaaagggacactgcagtgtaattaagtggacacaccttgagatggggagattattccgcatttctcaagtagcccaatttaatcgtatgaattcttaaaagcagagggtctttctggctatgtcagaaagataagatgtgagaaggactcaatctgctgctgctggatgagatgaagaagaggaccacgaactaaaggaatgtgagagtctctagaacctggaaacaaccctcagctgaaaaccagcaagaaatctggatctcagtcttaccacaagaattatgaagtccctgccaaccatccaagcaaaaatgaaatgggtctttcctggaacctcctgaaaacagctgacaacatgattttagtgtgatgagacccatactagacttcaggtgtacagaactgtaagaaaattaatttgcattgctttgaatcactaactttgtggaagtttgttttggcaccaatagaaaattaatgcaagtggtaggggcaagaaaagagaagtagctgccagtagggtggtagctatggaaaggttatggccaatgatgatgcccagaggtagtttggggcaaggtattatacgatgtttattaataatgtttccaagctcagaaatcaatcagtaaagccctacctgcagtgggggaaggtaactagtgcaggagaacaaactcctgctgggttctctgccctcggtgcatacaccaaggatgctcagcgcaaacatgtgctcaaactatagaaactgcaagtttaccaacatgcttaagaaacaatacaacgcaagtctaaacaactttaggccacttgaaatccttttctgaagtaggtgggtacaaaacataaataatcaccaccaaaaaagatgcattatcttttgacagcacaaaacctggtccttccccttatttgctttggctgccttaaaggtcaccaaaactaaattcactccagttgtagtaactctttcctctttaccaactccttgttccattttatagtagctttaactttagagccacttcaaatccttttctgaagcaggtgggtgcaaaatataaataagatagcagaattgcaatatgtgtacacatagatttattcattcttggctgcaaatgagaaaattaggataggaatgaaatgaaaactgtttctaaaaagattggccaggtatggtggctcatgcctgtaatcccaagactttgggaggccgaggacatatcacctgaggtgaggagttcgagaccagcctggccaacatggtgaaactccgtctctactaaaaatataaaaagtagcctggcatgatggcaggtgcctgtaatcccagctactcgggaagctgaagcagaaggattgcttgaacccaggaggcggaggttgcagtgagctgagattgtgccactgcactccagcctgggtgacagggcaagactctgtcccccgcccctccccccacccccaaaaaagaaaaaaatatataaatatatttatataagcaaatctgattttaaggatatatttattaaaataaagctaaggcgagaggcatacattcaactcataaaaaaatttaaaaggacactattaattggtgattttaaaaacaataaaaattaacttttaaaaaatgtaccataacataatctgacaactggtgacaataattgcatttaataattaagttcaaggaaataaaaatggatttaataattccggcaaaactctaagcaaactgacaaaactcatatgaagtaatcttgaacgtattaatagagaaaattcaccaagacaggagcatgccatcattttatcctgacttaatattctattacagtttcttcacatgcctagaccaagagtaggcaaactatagcctatgggccagtcacccaattttgtacgtaagttttattagtttgcatattgcctgtggctacttttgcactaagaaggcagagctgaaccgctatgatagagatttcatggcctgcaaagctgaaaacatttactctaactgcacctttaagaaagaacttacaaaactctggcctagaccctagggatcctcattaataaagataaattattcttatggttagaagaaaaagtcgccaccaatataagtaaatgcttgcctgatagtccaaaaatttcccagaaagcaaaatatataaattactatgtattagccagcaaaatgaacaaaaataatcattacactagctacttatgtctataactttgtttacaatagcttatatgtacatataatatacatatatataacagagatgacaaaaaatgtctaattttgttaagtcaggctttgcaaaaatcaaactaaaacacaaccagagccaagtgcaaaaattcaacatgtccaaaggatatgtggtcatgttgtaaggtccctgcctcactggtatcagaaatagagtacagtcatccctcagtatctgtgggggattggttccagaatcccagcagataccaaaatccagattcctcatataaaatgatgtatttgcaaataacctacagagatcctccagtatactttaaatcatctctaaattacttataacacctaatacaatataaatgctatgtagatagttgttatacgatattttttaatttgcatttttttattgcgtattgttattggcttttctcccaaatatttttgattcgcagttggttgaacccataaacatagaatgcacagatacacagagctgactgtattcctcattaatctggaagaaaagcaaggaaaacaaaccagcagcagctgggataagctcagtttatgctattccctttctccacacagaaatacaggaatctttggaccacactcaatgtctactccatgttcttctcaaatgttttatgttgcccaccagcctcatgtttgtggacctccaagtggttcctcccaggtgtcccaaagttctctacccatccagaagaccaaaggatttcctgggtgaattgactacgtacagtcgctgagactgcataaaagctatcctaatttagtactaaggtctaccatatcatactttcctaacatttgcatgaaatcacagagcaaagcttataaagctatggtgcctactgctctatttcacatgtagtgtttgtgtcagtttcaaagattaaccactgccaagtgttcagaaaacaggccaggttccataaaacgctgccacatctcaggtgttgaggcaataattaaagagaatgaacgtcaatgaacaggtcagtaaaaggaacagctgattgtagggtaaaaagcagctcctttgtggtgaactggaggagccatttctgatagtcaaatgtcccggtcattggagaaatgtacagaccacatctttcaaccttccaaattttggttgaatttggatggtaaatatgggcttttttactaagtaaacattgttgcctgtaataacttagcaattgtctacattcataaagcatgaagacaggtaaacaaaatgataaaaactgaaggtaaaatagacaaaagcaaaagcacttggcaaaataaaagccgaaatattcaaatattggttttctcctacaagatcatgcgcccagactcaggggccactgctccaactgaagtagagatgctctccctatgaatctggcttctctggttcagaggaagtatcatgtctgtgaaaggttaattatcctagtaatcctatgccatttttcaaaaactgcaaagaaattgctttatagttggcctcattctgagatggtatttcagagtaagcatcctaccttaatagaagcaatatggagcaaagtctctcctctatgatttcttttcacagccatattgggcaacagcttcattgctgagggactagacatcactcgcctgtaacttgaactacttaatgtagaaggtggtgtacctggtgaaagactaatgaattcatcggacatgttactgtttttcctccctgatgtaccaccaactttacgtttgcatgaaggtggtgaagaacattcaggcaatggtatattttctgagggcaccgtttgcttaacaaaatctccactggtgctcagaatgctggttctacatctcttagaaatgggactggaaagtctattgtgatggccacgttttccattattttctaatggcaaagatttcttagatgtaagataatttttgcagaccttctcaggagtcactacttcattcctgctcttagtgtctggagactctatttgctcagccaatggtaaagagacttcagttaaacttccaaaacattcagattctgtcaaggagccacttgctagtaagtctatttcaccatttatctgaggactggagataacagatggttggctacagaaggataccagcttttgcttagattcctctttggagtcaaattcaccatcttctttttctgcctctaaattccatttttggttgatttcagctaaagttttctttttttgcttttttccagatcttgcagaagcctttttagccctctcagaaacatctgcaggaggacttggggaaacaaattcatatgagtcttgctgagcacttgcatctttttttattgcaggctgggtttgcactgaagctttactcacaacatatctgactttcttacttcgagggctaaaccacattttaattgaattcttcttgtttcctgcatcattaaacaaacttttcctaggtttatcttctttcaaatctgacagaaaaaaagaaaaagaaatctgttacatgaaatttattgctcccacatggagctcccgaagaattttgtttacagttcccctaaagtgtatcatcttttaattatgtacttctttctcagctcctagagtgtgaactctttgatagcagatattcactcattcaatacttactgaatccgactttgtgccatatcctagagactgaagatatagcagagaacaaaacatgaaacttatattccaaatatagtacccaaaaaaacccataaaatacaaatctaacagaatgtataagttctgtttgctaagaattacaaaatacttattaaagaattctacacaaatggagagatataccatgttcatgaactataacaatattgttaagatgccaattgttccaaacagatttacagatataacaaatcccaatgtaatttccagtaggcttgtttgtaaaactcgacaagcaattataaaatttacacggaaaaagaaaggtacaatttgaaaggcaaaagacttagaacaaccaacataatactgaagaaccaagttggaggactcatactatatgacttcaaaacgtatctctgacaaaatgaataaaggggattaaagacaatagtcatgaccctttaggtatcatctaatattaacgtcaagctgtataaccaaagattagtaagaataaatgaacaataactacatattcaaacataatctcttaagcaaaataaactacatacacattatatgttttcacttacatcaaatataaaacagtcaaaactgatttaatgtgttaagtcagaatagtagttggttacccctacagggaaaagtagtgactgaaagggagcacaagaggggcttccagagtattgtttttgttctgggtgagttcagtttgtgcaaattcattaaactatatggttagaaaatatatattttttctacatatatatatataaaatactttttaaaaatttgaaaaatatagatttataatcaagaattaaaacacaaagattccattgagggtagacagaatatacaaagattcagcagagtttttaaaaagaaaaaaaattgtctctatgtacacaaagtgccagattttgtgagagatactcttctttacactcacctgctactttaattaaggtcatcaaggaaggcatcaaggagaagttgatttttgagctgagatgtaaatgatgtaaaggaaacagtcctgtggatctcacatccaatgcagaaaagggatataatgttttatattgtagaattaccactctgactgccatgtggaggaggaactttggaaagaaaagagtagaaacaatagccaattatgtggctatcatccaagaggaaatatattggctctgacaagtgttacagtaatagaaatggtaaaaagcattctaaaagatcacaagttacctagaccaagaggcaagagcaagatgataaaatgttcaaaagcccaatagcagagagcatacaaagttgttcctccatattatcaggggactggttcgagaactcccttggataccaaaatacccacacactcaattcctgtactcactcctggagaagcagagtgtagaaaaagtcagccctctgtatacttgggttttgcattccatgaatactgtattttccatctgcatttgaccaaaaaaaatctgtatataagtggacccatgcagctcaagcctatgttattcaaggggcaactgtagtaagtttaaggaattaaaggatggccagtatacctcacttacagagaccacggaagaaagtgatttttaaagaaaatgtggcacatatacaccatggaatactatgcagccataaaaaagaatgacttcatgtcctttgcagggacatggataatgctggaagccatcattctcagcaaactaacacaggaacagaaaaccaaaaaccacatcttctcacttataagtggaagttaaacaatgggaagacatggacacagggaggagaacatcacacaccagggcctgtcagggggttgggggcaaggggagtgagagcattaggacaaatacctaatgcatgtgggtcttaaaacctagaagacgggttgataggtgcggcaaaccattgtgacatagatatatagaccaatggaacagaacaaagccctcagaaataatgccacacatctacaaccatctgatttttgacaaacctaacaaaacaagcaatggggaaaggattccctatttaataaatgatgttgggaaaactggctagccatatgcagaaaactgaaactggaccccttccttacaccttatataaaaattaactcaacatggattaaagacttaaacataagacctaaaaccataaaaatgctagaagaaaatctaggcaataccattcaggacatgggcatgggcaaagacttcaagactaaaacaatgtcctgaagtcttttactgcaatggcagtaaaagccaaaattgacaaatgggatctaattaaactaaagaccttctgcacagcaaaagaaactatcatcagagtgaagaggcaacctacagaatgggagaaaaatttttgcaatctatacatctgacaaaggactaatatccagaatctacaaagaacttaaacaaatttacaagaaaaaatcaaccccatcaaaaagtgggcgaaggatataaacagatacttctcaaaagaagacatttatgtggccaacaaacacgaaaaaaaagctcatcatcatcattagacaaatgcaaatcaaaaccacaatgagatatcatctcacgccagttagaatggcgatcattaaaaagtcatggaaacaacagatgctggagaggatgtggagaaatagaaacacatttacactgttggtgggggtgtaaattagttcaaccattgtggaagacagtgtggcaattcctcaaggatctaggaccagaaataccatttgacccagcaatctcattactgggtatatacccaaaggattataaatcattctactataaagacacatgcacatgtatgtttattgtagcactgttcacaatagcaaagacttggaaccaacccaaatgcccatcaatgacagactggataaagaaaatgtggcacatatacaccatggaatactatacacccataaaaagaatgagttcatgtactttgcagggacatggatgaagctggaaaccatcattctcagcaaactaacacaggaacagaaaacccaacactgcatgttctcactcataagtgggaggtgaacaatgagaacacatggacagagggaggggaacatcacacaccggggcctgtccgatggagcggggtcaggggagggatagcattaggagaaatacctaatgtacatgacaggttgatgggtgcagcaaaccaccacggcatgtgtaaacctatgtaacaaacctgcatgttctgcacatgtatcccagaaattatagttaaaaaaaaaaaaaagaaagaaagccatttgttctttccatagaagccttttcttccctctacctcttccccttaatttaggtttataaactcccatttttacctgtttggagagtcacatttttctgtgaactcacaagtatattcataaataaaaatctattttttctcttgctaattgttttacagtttaattcacaggcctccatacaatgaacctaagagtgtagaggaaaagtttttcttcattgacaaatcatacaagtcatccacttttctgattttgacgatcaactaccttcaagttgtcttatgttgtttttgtctttgggatattcattttcttcaagaaaaaaaaattgccttaaaattctctcccaccccatgacaacataggtaaaatcaacccagctcagcccagcacagtggtgagcacatgaatagacagtactcagtaagtactagtgaataaattatttgatatctcttaaatctttccaaatgtttacgtaagagatgttagaattaattttaagagctagaagaaaacttgaaaataatttagtctaattctttcattttaacaatgaaggactaaagttaaaacaaaaagaaggaaggagtcccctaactcccaatctggcactctatctctccacacaaactggattagcaaaaggtaatttcaggcccagaaaaaaaaagaaagaaagaaagaaaaagaagaacattagaaacggaggaaagttggaaaaataacaataatctgataagattaaaaacagtaattaacaaatgatttcatgctgcctgacaaacattctcctaattaacacagacaatctcctctgaccaaccaggcttcttacaatatgttttgttattcctattttaaaaagaaagagaagagagagagagacagagaaaaagagagaaaaagaaactacccaaattttgttttcctccttaagtcactcttcattcaaatcgaaaagaactctgcataaaactttacctacattacagaaccaaagaaaacttttaatggaatggagttctaaacctaaggtactttaagaagaaaaccagtggccactagtcttattcctaagggatataacatctaccatataggaaataaacatctgatgttacaaggtgttcaataacattttcaaatggtgattattactgagaacttttaatacttaagagatacaacattattttcattttcttacgttttggggaataaatttcttttcaacattctcatgtctttattagcaaaagaaaagtacatcatctattattttttatttccttttagtcattttttatccacatagaacagcttgttttattgttttaccagcttaaaattattaatacaccagaagattgttaatgatcatctcaattctttcaagttcaaaattgcttcttctgcctattctttcacctcatatttcttgagtacaaaagtcctatcttcaaaaatatatttacctggtaaaagaaccttaaacaggtaagaagaaatgggaaacaggctttgaaaaataaaataattagtacttaactctagaaatttcagacatggtccctctctagcaaaagagtaaagattttctactccaaagtgtaccatcacttcctgcagatgaaatggaagcactacactgaaaagacagtaaaatgataaacctactgaaggcaggagtatgtatatgaataagggcagattctcctacataaacttttaaatatcatagctgaacatgacctggtccacaaagtgttattaagacaggatcttggaaagtatcagaatgacgtatccattcacatagagactttatgtctagattcaacaaggtattttctttgcagtggtaagtagatttcaaaaccaagtcacttctgatataatctcaagtctataggaaaggtcaaaatgaaatgttaccaggattacttttcaagaaagactcaggattacaaagtcataaaggttaatcctctgatagtctgtaataacttgtatttgatttttttttaattattttaaacacagatgacattttcaattaaaaccatgttcaaaccctgaggttctcaatttttgaaaaactttaaaaatgtagaattgagcttttaaaggaaaattaaggcttatatatagcagcaacatactcaactgactaaaaaacctcaatataaaaagaagaaatttcatactcaggtgtacatatttcctaccttataaatgagtaaatgaagataatatactcaatgtaattgatatgaacacaattttactattcatctggtaataataactttactcaaaagattttaattatgtatcttgcataactaagcaaggagcacaacaaagatgactgtatattctgaattttattagatattctgaatatctaagataatattctaagataaaactgtaaaaagcaaaacactattgctggaacataaatcacattattaacagctaccaacaatttttatgggtgaatgcttctcagcatgataaatcaacatattcatttcatgaagaaaaatactggtccttcctctgcacagaaaattccttaatgataatatttaaaagaattccattctctgaatttcagagtacatcacaaaatattgagtaacagagatgcatgtgttactaaggagctgcttggccaagttttttcttacaatttaataatcaactatagaaaaaagaggcaattagaaaatgtgatttagctatcattaatctacatcaaaggattataatcatgtacactgtgtgcctttcaagttattctctattataggtttcacaacagaagttgagaaatctctttgacgaaccagtcccttattaaaaatcaaaggaaagtcctttgctaccatctgtgcaacattaacgccttcactgaagaatgattattttgtaagctaggaagcatttagtactatttaagaaaaacaacagcaacacagctattcaaacattcatcttcctctattataaaaaagtcatagcatatatgaaacactatgtaatcgttacagaaagacgagcatctctctctaaagcagaaaatagaaaaggaaattgtaatactataaaagcataatcaaagtattttttttttaatgtcaccaacaccgacatgtttcacagaacctgaccagcacctgcaaggtctgacttaatatgatagggttgaagagaaaataaaaacttttaaatttaactccattagtaaaaagaagatcatgttataaaggataaggtaaaattatccataaatggttgtcagcaaaatttgacaatctcctctttaaagtacactgaaccaagaaaaatctgttcaagtatttagaagctcattttagaaagtattactacaaattaggcttctttatctccagtataccatacactatgtccatgatttgacaagttcttcctaattgcccaccttaattacagtaattatatatattatagtaaatgcaagtaacaaggttcatttgaaagataaattgtgaactacagggtttttaaaagagaaaatgtgagagatgttcaccattccacttaattcatcatcttctacacatgaccatttaacagaatcatacaattttggagagacagcttaggaatcacttaatctaatacccttatcctaatgagatcattttccaatctccttactattataaagaagaccaactgtcatttgtccccaactatcagttcctggtatatagtttaccttctaaccttttagttctagaagtacttactagataatcaattaccacaaaggtactgcgtaaaatacactgaatagacaaactataaagaaacaaagggaaatgttccagaaaaaaatctcaaatgcccttcaaggctagtttgttttgggaagaatttgggatgaaaagttgggggtctatacaacttatattaaagtagaaaaagctctacaccatggaatttagagatctggacagaaggttataattcagtatgtttatactctaaatttattgtcatttcctatcaaagtagcaaagaaagatactaccattataattttttaagaaggtctatgaatgcatagatgttatcattatgaaatgaaattatttaaaccaaattctaagaatgtattttaaaattattttaattaggtcaggcacaattagctcatgcctgtaaatcccagcactttgggaggtcgaggtgggagaatcatttaagccaggagttcaggaccagcctgggcaacacagcaagaccctatcaccctatctcttctaaaaaaaaaaaaaattaattggcagggtatgtggtggtgagtgcctgtagtcgtagctacttgggaggctgaagtgggaggatctcttgaacccaggagttcaaggcttcagtgagccatgatggccccaatgcactccatcctgggcaacagagcaagacactgtctgtctcaaaataaataaataaataattttaattaagtttagtctctagcatataaattagcactgccaatttttatccaactcaattcaacaaacataatgaatacctacacttcgaaccaaaaagttgtgtaaaatagaaaaacagtaagaaatttacaacacaactgccctgtgtagcctgggtcctcagtttccttacctacagaataacgggattaaagatgaccttcgtgttcctaaatttctgattatgtgttatctaaacagggaacttcaactcagtttaatataagtaacgttgagggcgcagtgcttaagtctggtaaggactaaaataattattcctaattataataaggaaaacaaacataaaatggcctttgggaaattaatcagtagaattatctctccaatctccaactctacttagatgagaaagaccgcattcttaaaggcctcagaaacttgttctaaactcaattttcctaaatatctttaatgatgaaatatgaagaaagcatttcatattccatagtcctcaaaatataaatgattcaaacatcactagctagaataaaatttctggaaaggagtctatcttactcttttttgcacccctatggtatgccataactgacaacggtaaatccatcaagggttaccctgctctccatttatcatcattaaaaatgttatattgttataaattgtgttcctcccccaccaaaattcacatgttgaggtcctaaccccccagtaacttagaatgtgactttacttggaaataaggtcattgcagatgtaactagctaaaatgaagcgatactggagtagggtggactcccaacgcaatatgactcctgtcctttaaaaagggggagatttgacacaaacaaggagaaaaccatgttaacataatgatggccatctacaagacaaggagactggcctaaaacaggttctgtctcacagacctcaacaaagaaccaaccttgcatacactttcatctcagacttccagtgtctggaattgtgagacaataaatatctgttgtttaagccactcagtttgtgatactttgttacagcagttctagcaaatgaatacattactatacagcaactggtgaagaaccaaatcaaaatatcatcatagccacaaatcccaaagtagcactccaaatttcagtgcaaagccaataatcctaacagaccacacactcctaagaatctaacaaaagtcactttcacacaaacatgaacagttttcatactgcacaattaactcaagaagctcactgatcccttacccacttcaactctgaacactgccaaaggtgcatgggcccttgattaagaacccctgcactgaccctcggtatctatgtggggagagaaaggtagatcacacaccaatctcttttaactagaaaataaacattgtcagtactgtctttaaataagaagagttcagatgaactaatgacagaatttttcttcagtgtgttcttaaaaaggtttacaactacaatatcatttttaaaaaacggcaacttttaaaaatgtgtgtgtatagttacatctgaaagtaagaaaaacttctgcactacagcacattttatcataaaagaatggagttgaatacaatgacgcagataactagctgaaggaaaattttaataggtataaagtgatttaagttctaattcttaaaaatatggacctgtggtaagactcaaagtttttgccacatttatttattttgtataatcaacttcatctttagctgacaataagacatcatggcaggattctaagaacaaaagatttaaaaatagaaatctaacaattttatatgagcattatcaatcatccatggcatcctgccagtcaagaacacgttcttctacaaacacacactaaaatagcatgatctggtcaataaaaagacaactctaatatccaattatgaagatacaaaacattttactttctttccacagttaattagttctcagcagaaagcacaatggaaagatacacagttaatacacagagtctaaggacaatttaaaaaacgttaacccccacttaaatagaaaagaaaatgaatattagatttctgctctttcaaaatgtgctcatctaattaattcagtctagaaaagtgatccatggaaaaatgtcgtattctatcttgggaaagtgtatttaagtgagttaagtgctattaaggccaaaatcactattccatatatattctgcagaagttatcataaatgtaaaaagcaggcaatgtaaagcagcaaaaaagttcctggatttacagtcagaaatgggctttatttctccagcttctagtactaactacacatgcggctgtaggcaaggttatttcacctctctggaccttgatttctcaactataaaataagggggttagactttaattatctctatggttcccgtcatttctcaaaatgatcttccaaaaaaccaccgggtgtgtcacatgcatgtaccagggaggctgaggtggggggaatcccttgagtgcaggagttcaagtccggcttggacaacatagagagactcaatggctatttaaaaaaaaaaaaaaaaaacctacagattttaaaatctgaaatacgtattccagaactccagatagatgttttatatactttatgaatatgaattcatcagtttttaactgatgaatttaactaagagagatagggatagttcttacctgacagctcattgtcatgtagcaaatttcgaagcttactacaaagttgaatcatgctgtccagttgtctatttatcttcaagtcttgtatccaggccggggtgtaacacactggacatccagttccaatgcagtcacttacacaattactttaaaataattaaaaaaaaaaaaaaaagcaacccattcagcagaatttaattccaaaaactaaacagtttgaacagaaataaatggagcagaggttattctaacatacaatggtcaattgtaatatccttgttgaatactgttttaaagagtaaaatacatacatcaaatctaaggttgctcatgtaatttgctatgaagagactttacttagcctgattattagtctgcataattttccctacaaataaatctgtagcttctaaaggttacagagatgtaacagaaagatagaatgcctaatgcatagtagtcgtgcatcctaactttttctatcttaacattgcatgaaaatacccaaaactactgcagacactgggaaagaccttctgttttgttttgggactagtatctcaaggctttaaagtagcttttgggaaaagatctttgactttttcagacaattttaaaacctgtagactcaattacctgggttatctaaggactaaagtttcagagttagaagagtttttctaattttggggtttatagaccttttgcaaatctgatgaaaatctatacatactcatgtaaaaagagggattcacgatcccccccacaagcccatctgtgaattccagaataagaattctataaatctcctccttcattggcctcaccagatgggttccagtaggactgagtaagtaatgtaacagttgaaaagccacatcttccccaagcaccacaggacattccttgtcacaggacccaatcctctgtaggcagagaggattcttactcaatatgaactatcctcaaacaaaacctatgccatttctaattcttgtatccttggcttctagcatgatttctgacagaatgtaactcaaaaaaaattgtaaaatgaatctgtaacccataccagagctggaagagacttttgggaccatctaattcaaaaaatgtcactggggtcaataaatgtcaactttctttagcaaaggatcttctgtacatttgtttgctagtagttaagaactctaacttggaaccccaacacaaaaaaatatgtaaaactgattactcatgcaatttaaatcatttgtgcaatacttaattatcagtaaaatacaatctgaaatcaactcatcaagaactaccacctcatttttggatgaagaaaatgagatccagttatttaagttacttgtccagcactgcactagtactcagatcagactagtattttatatttctataacattttataaactattcccaaattattttatatacattaatttggaattctgaaaaaaatgtcatttttcggtggacctgtatagctcagtgagtatttctcaaatgacccgtgtgtgatgtcataaaatcatgctgagtaacagataaattcaaagtactagataaaccaatgaaatttcatgtaacagagtataaaaatttattgatatagtttcagattccacactgtgatgaacctaaagaaaacagcacttgttggccaggcatggtgattcattcctgtaatctcagcactttgggaggccgagacaagagaatcgcttgagcccaggagttcaagaccatcatgggcaacatggcaaaaccttgtctctacaaaaaactacaaaaattagccaggcgtggtggggtgcacctgtagtctcagctactcagaaagtgagattggatgatcacccaagccaagaagttgaggctgtagtgagccatgatcgcgccactgcactccagcctgggtgacagagtgagactcttgtcttcacaaaaaaataaaaataaaaaagcacttgtcaagttttggtgtagtattaaagaagaatagccacaattatctaaaaaagctactgaaaatacttcaatacttcttccaactacaattatgtataaagccagattttcttcaatcaaaaaagtatcacaatagactgaatatataagttgagaatgtagctgttttccattcagcaagacagagatttgcaaaaatgtacaacagtgccactctatttttttctttgatttgttaaaattgttatttttccttacaaagtgttatttgtgtttgtattaatgggtttattatttttaaattaatttttttaaaaagtctcagttttgtacggtaaatgcatgaacacacaaaagctctttatggttctcaattctgaagaatgctcaaaatgtttgagcacccctgccacatgtcttaaattgtatcttagagagtagatgaattacctttatcagttgaactgagctatgtcaaatcattttaaaacctcattgctgagcagttttaactcaaaatctgcatgaataaaaacagctaccataatttttggcatcatataatcaaaacaaatcaaaactgcactgaatgaattctttcctacgttcatgtcatatacacataatcattttctcttttaagatgttctcgtgtctcaaacctttgattggttgttttaagtcacagagtcctttagaatctgattaaacgtatggatcccccaccccaccacacacacaaaccaactttgcataaaatgtcatggagttcattatgctctagcagctttgtgactgacctattgtatacagtgagcaaacccatcatctgtcagctgaaacaaaatacatctgcttgctacagagtggggacagggagtgggcatcatttcgtaagcagatccatgggaggcgttttggaggcagtgacatttcagctgatatataactggtaaaaagtaagcctcacagaaatctggcataagtacatttcacgtggaagaaatagcaagtgccaaagtcctggggcgggagtgaatttggtgtattgaatgagctaaaaggagaagtgctggaacagtgtgagccagaggtaaatgacgtccaagaggaagacaggttctaggtcccatacagggttttgcagaccagagggcagagcttggattttattttaactgcaataggaacccactaaagagtttaagcagggtaatgatatggatattatcgtgatttttcaaagatcactgtcaagaatgtagaaaatgaggaaggggtgatgatgccaaaaagggaagaccagctatgaacctatcacaatagtatgagcagagataatacaatgatggcttggaacaaactataaactgtagaaaattcagaaaaaaggtggaaaaattcaagattcaggacacattttgaggcagaactgacagaacttagcgatgtgggataagcaacctagcagtaactggtaccatttactgtgatgaagattacccaggcaggaaaaggctgaagaggaggatgatcaagaggtcagctctgaacacaccaactttaaaatgccttttctttcatcatccaaacagacgtatctggtaggcaacaggttccatctcctaccccccatcctcctgctggatatccctcgtataacagatctgtttttccaggaacaaaattgggacccaaaacatagctgcctcccagacaaccttagcccttgaagtaatacacaaggttattttcatatatgctcaaatttccgaatgtatttgttcatgtcagacagtaacatactcataactggaaataattaaaagattaattcaaaggagactatattttccctgtctcataggcaattaaactaagacacttaatctctcaactgatttctcctgaacaagaaataagagataaaaatctaatcttctgacctgtaagccagggccatcacatggatataatttcacaataactgttatgcactgaattgtgtcccccaaaaagatgtttgagtcttcacccctcagttactgtgaatgtgacctaatttggaaaaagaggctctagacgatcaagttaagatgagaacattagggtgagcccttaatataagtggtattcgtatgaaaagaggaaatttgacacagagagaagcaagcactcaaggaagaatgccaggtgtacatgaaagcaaagaccagagtgatacatctccaagtcaaggaacagcaaagattgctaggggaaaggcaaggagcagattctccctcacagcccacagaaggaaccaaccctgtcatcatcttgatcttagactcctagcctacagaactagagagacaatacatttctgttgttctaagccacccagtttttggttctttgttatggcagccttaggaaactaatataataactgtaagacctatactttcacaattttgagtctagattcaaaatttaactggaaaatttaaaaacatctatttgaattatataaaaggcattaatttttttcctccaatttggcaaagctgtctactaagctttgtaacttggacaagtcatcctctttgagctttggttttcttatttgtaaattaagacacagttttaaagatcaaactaagataatgtacaataggttactttgcagactttgaaagttacacaaacatcaagtaccattattatcaacaagattacatgattgttatctagtaaaaaatacagttgtactatatacatcaaaccgtaattacttacctacagaagatgtgctcacatcctcctaaacacacaggctctctcagaatgttagtactgtttgaagaaattaaaacaatcaagatttgagtcattgttagataaacatctcacacccaatatttcatccaaggcccaacactaccatatttctcactttctcaaagcagaaggtattaaggatgcattcatttgaaaggctgttactccctggttaaatattgtaccataacatacctgatgattttaaatagtaaccaccaaactgggtacaagttgtaatacattttaaaatgtattttctagaaagttggagaaaggaacaattttgttcaagtatctctaaacctcttaaggcaaaaccaactactggctgcttctttcaactactaaggtgtatcttccccttatgattcaaagtgtagaccatatacctcaaaatgtgtcccacacgtagaatgaccatataacgtatcatccaaatgagaaaacttctgagagtgaagaggagtgataattgaataggatgctgggacaacaggaataaaccaggactgccccagacaaaccaggatatctagtcattttgaccgtaagaatccaaggtttcccaattaaaaaaaacatgtgtttcttactactgtaaagtagccatcaatttttcacagatatattgtgaaaaatgcagccattctttcagttcacagaaagttaattgttctttaagcaaatgtaaacagaaatcatcagattagcagtgtgtctgcagatagaatgaagttccctgcagtgagtgagcaaagagacacagaaacaaaatatttctaatactgtccatcaaaatacctgctacatttgttaatcctaacaaagtaatgatactaataaatacacaccaagacattatactcaatggatgtaatgtacccagagaagtaaagccttttaaatgatgagcactttttctgcttggtttattatactaactctaaaacctttagatatttacaccattattattaaattacctctgtacacataccacgtatcaataaaaacaattcttcacatttcttgaaagattgaaagtatcacactgcacatcttaatagatatgaacattcaagtgaaattgagattttcagaaagattgcgaaaaacagtacacacccacaatgttattctcaagatactgaaaatggtgctcactgacgttacaaaacctattactttttaaaaactcaccatgtctgatttttgtatcacagtatgtaaaacgtacagataaaaatatgacttgtgactctgccaataaacatgatctcttttaacattcatactgtgtctataatttttgttatttgacctagcaaacctaacctccttttccccatcaagtgtactgaattctatttcgtggcaagctcctcctatcataatatccttcctttacctcttttattacatcgccctggccaaacctccaccttcaggttgctctctaccttgaaagaagtccattcagtttcctagcaccttggattccctatccagcccaggccagagttaactatttccaagccaccttcaccactacctaattgtgctgacctcttagacactcatggatgccaatctataatgctagataggccccagagtctacttcttccctgcccactcaggctgcgaataaccactattaaaaaaagaaaaaaaaaaaaaaaaaaggaaagaaagatgaataaacttctctctataaattcatttggtagcaaccgggtactgaggctcatgcctgtaatcctagcactttgggaggccgaggtgagaggatcacttgaggccaggagcttgactggcctgggcaacatggtgaaaccctgtctctactaaaaatacaaaaattagccaggtgtggtggtgcatgtctgtaatgccaacaacttgggaggctgaggcacaagaatcacttgaacctggaaggtggaggttgcactgagccaagattgagccactgcactccagactgggtgacagagcgagaccctgtatcaaaaataaataaataaaattttaaaaatataaaaattagccaggcatggtagtgcacgcctgtaatcccaggaactggggaggctgaggcacaagaatcacttgaacccaggaggcacaggttgaggtgagccgagattacacccctgcactccagcctgagtgacagagccagactctgtctcaaaaatattaaaataaaataaaataaagacataaaatttatttggtagcctcttcatgtttgtatctctaccaaagtaatgtattcaatattctataaataaacaaacaaatgaatagatggctattcaaaacaatctctatgcttcctcatctcattaactttactggaacttaatggtgtaagttttttaacacctaaatacatttttatctcttcaccagtcatcttacccttcctagagtctaagaggaaaattcgatctcctttagtcactcttcctaaaatgtgctactctacctatagttcccatatcttttctgcctcccaaagcactagatattcataatacttgcctttcttctctcatttgcatctacacatgaacaggtaatctctcctttgacacagaaaaaacacagttttgatcatacctcccattctaccttctgctccatctcttccctttcttgaacagataaaagttcttaaatgagtgctccataccagctactcccatctcctcaccttcctagctttaactccctccactctgctgaaactgttctccaaagcatttttggtccccttctctctgaccactctgggaaacagcactgacctcatcttctttcctgaaacctttccttccaccgcattttaatatttttatacacattgatctgcctatttcagcatttccttagctgcttttcctacctctccatgtaggcatacccccaggatgcagtccgtagccttccggctttctctggcaatacttgactcaacgccttgattctgtttctcaactttaaatttccttcctaagatgactgaactctttagctatagttcttaaccttcactctagcaataaggtgctatcacatattagtaatgatttaacatgtgggaataattgatcagttgtactaattattctaattagtgagttagaatatatatttgtgttgctgttaacggataaggaaagataatggaaatgtgaatgagaagtatgtgcacttgtgtgtattgggggagggaacaagaaggaagtgtgtgagccaagctgagagagaagggagtgccaaattcagtggcacatgcctgcaatcccagctactcaggaggctgaggcaggaggaaagcttgagcccaagagttcagggctatagtgtgccatgatcgtgcctgtgaatagccactgcgctccagcctggacaacacaacaagaacatgtatctttagaaaaacttttttaaaaaattattacaactaggagatacctatcaagaatataaatgcatccaactttaactcagctattccactgccaggaatttgtccttcagcaacactagatacttgcaaaaatgaaactttcaaacatcaaagatatctagacaagattctaaaaccttccagagatttaagaaataataaaattaaatgtcatactttttttaaaaaaaggaatcaggatagcataagacttctcaagggtaataagagatgctacagaactgtggaacgaggccttcaaaataattcttgacaattattttgtactttgaattctacatccactaacttccactgtcaaagttaacagtagtaagaaaattcatctttgagaatagttaggaagttaataacatctaaaatggaaaaaaaaataaatagcaatataaacatatttggaaatgtagaggtacatgcttgtaaaactaaaaaaaagacaaaagatgtttctgatgcatagaactcaggggtgatgaaggatgaagcaaagaatgttttcattaatagtctgtcctattgactctgtcaactacgttcatgtataactttatttaaaaacattttaaatgtaaaggcacatgacatcagtatcactccagcactgcttgttacagcaaaagaccacaaacaacctaaatgtttccaataaggaaatggttaaatgaatcatgcaacaactacatggtgtttagtatctgcttatctgaggcagtacaatgcttatatgaacatagaacctcttgaaggatacacaagaaactgataattataagttactgaagaagattcacacttatctgtcgttcatttaacaaatactgaatggccatatactgtgttattttaattcttttcacacactgtttaccattaaaaaaaaatttactattaaaaagttcttcacaatctgtaacacctaagccatgcaaccttttctctcattgctcctcaacaaaaactctgctgtggtcaggccagtgtctcttacaactattattagcctatgtccatctcttggatttcagcctccagccatcacttctgcaaaattcatgccatgtaacatctaaagaacaaagttgactgtgttccactcttttctaagggtcttataatctggccaattaattacataaaccaaattaatatgacttaaaagatgtacaaaatgctctaaagttacaaagaagagagcatctagttggggttctgggattcaatgttgaaaaccaaatatttggcgggggggggggttgtttttgttttttttaaaacaagatcttgctctgtcgcccaggctggagtacagtggcatgatcacagctcactgagctttgaactcctgagctgaagaaatcctcccatctcagcctcccacatagctgagactacaggtgcacaccaccatacctggctaattttttgtagaggtggggttttgccatgttgcccaggcttgaaaactaaatattttgtacagatgatccctgactcacaatggttcgactcacaattttttagctttattatcctgcaaatgtaatacacattcaatagaaatcacactttgaattttgatcttttcccaggctagcaatatgcagtacaatgctgggccacagcaggaagtcattctgtttttcacttttagtatggtattcaataaattacatgagctattaaacactttattataaaataggctttgtgttagatgatttaacccaactgggctaatgttagtgttctgggcatgtttaaggtaggctgggctatgctatgatgtttggtagggtatgtatattaaatatatttttgacatacaatattttaaacttactatgggttgatccagacataaccccatctcaagttcaggagcatctgtattttaacttcctgattttctatttctcttgtcttgaaattagactccagccctaagacaagagatcttaactttcattttttctgagctccccaacccaccattacctacctagcatggtgctagattaactgcaggatttcaataagttcttagtgaatgaaccaaatggaagcctatatacaaaaatgcatttgtattaacaattccattttatccttaccctattttctgtttgatatacatatatattagatagaaaaaatccaaacaaataagagaagacatttgcatggtaacaggatttctgtaccttgaaaattcagctactctactttttccccatctacagtcatacttctgtaactttacatgtagttgatttagaaagatcagtgtggggaaaagcaagagagatcagattgttactgtgtctgtatagaaagaagtagacataggagactccattttattctgtactaagaaaaattcttctgccttgagattctgttaatctatgaccctacccccaacccggtgctctctgaaacatgtgctgtgtcaaactcagggttaaatggattaagggttgtgcaagatgtgctttgttaaacagatgcttgaaggcagcttgctccttaagagtcatcaccactccctaatctcaagtacccagggacacaaacactgcggaaggacccctgcctaggaaagccaggtattgtccaaggtttctccccatgtgatagtctgaaatatggccttgtgggaagggaaagacctgaccgtcccccagcccgacacccgtaaagggtctgtgctgaggaggattagtataagaggaaggcaagcctcttgcagttgagacaagaggaaggcatctgtctcctgcccgtccctgggcaatggaatgtctcagtataaaacccgattgtaggttccatctactgagatagggaaaaaccgccttagggctggaggtgggacgtgcgggcagcaatactgctttgtaaagcattgagatgtttctgtgtatgcatatctaaaagcacagtacttaatcctttaccttgtctatgttgcaaagacctttgttcacgtgtttgtctgctgaccctctccccactattgtcttgtgaccctgacacatccccctctcggagaaacacccatgaatgatcaataaatactaagggaactcagaggctggcgggatcctccatatgctgaacgctggttccctgggtccccttatttctttctctatactttgtatctgtgtctttttcttttccaagtctctcgttccaccttacgagaaacacccacaggtgtggaggggcaacccaccccttcagatcagtgctgtcagaggataacttagggaagaattaagtagtgagaacaattttttttaaagttcttactgatacaaaattttcttcgaaaagaaaaaaaggaaggtaaatccatctgagatgataataccaaggcagatctatttcttaatagaatggctcccctgtatctccatgaaatatcaactgctatttaatattaggcaagacagctcccaaagtgctcttacattttaaagaatcctcaaggtaattttaacgtgtggaccaacatgttgaacatctaaatgtgcaggctcaccaagccaattaaacaatttttcttgtgtttatctttagaagaataaagtgtttaacaagtaaagtatatggataatgacatggaacctataggggattcttagcaattcatgtaaattaactagatcttctggtattaccacttgcaaaggcccttcaaatgtgatcctaccttaacctaagttctttcatacatcaatttaacatacactaagaaactatgtgtctggcattgtggctacaaacgtgaacctagttttactaaatatataactgaaggagacagacatcactcaaaatattccataaataaataaatctcacaaataaattctaacttggaagatacgatacaagctgaacaccaatgatttgtgccttttctgtatgtatgttaaacttcatccagtggacacaaataactatgaaatctgcaaactggagagaactttacaaatcaacgagtccattttcctcattttatagatgaggaaccagagtccaggaaagctatacaaattgctctctttaggaagttaactatataaaccaactgagtattctgttgttaggctactatcactgatttgaccctgtcttaactctctgttcacctgacccagtccccctttaccctacaattctttatagctagttatttgcaaataacacccatcaccccagctccctgcaacctggctccattttaaaaatctattcgcatctcggcctggtgtggtggctcacgcctgtaatcctagcactttaggaggccaagaagtgcggatcacaaggtcaggagttcgagaccagcctgagcaacatggtgaaaccccgtgtctactaaaaatacaaaaattagccgggtttggtggcgctcacctgtaatcccagctactcaggaggctgaggcaggagaatcacttgaacctggcaggcggaggttgcagtgagccgagatcacaccaccgcactccagcctgggtgacagagggagactccgtctcagaaaaaagaaaatctattcatatttcaatttaaaagcccatgaagcttccttccactggccctacccaagtactcttctcagcactatgtcgacctgcacgacaatttaccctgaacttgtatttattttatcccttataattaagcatacactccttaaaggcagaagtagaaaatgcatcaccttatcaccccttacacagtgtctcagtgatttctcgttattctaatgaataaccagtgccagggagaaatcattccatttggggatcactgctctgtgagaatgcctctgaacattcaaaactcatgaagaaaggcaaaagctgaacccggagtcagagaacctatcctttatttcacaaatattcatatagtatttagtacataacagacacagctcaaggcatcttatgaatatccactcattttgtgcagatgaagaaaaggaagcataaaaagataaaataacctaaataatggagccaggatttgaacccagggaatctaactccagattccacacatttaacatctacactatgctgcctcaaagtatgagagaatacaaaattaagcttgatcatctcctaaacaagaactcagaaaaaaaaaaatacctatcataaaggttaaaagattactttctaacttttcataaaaagttgattaaaaaggcccacgttacaattgtcatagatgtctaatcccactctcaccctcaaaaatatgccaagaggtacctattaattcacaaaacagtgttatatgacacctggggcttctacactgcagctcctattaccatttcctgcttcctttaggaacacattattactgtgctttctgccagcctctcaaataatatggtcttcctgtctcatttttccaaatccttaaatagcttctttctggttgtgaggcttggtcctaatataaatgtcacatctggcctcttgaacactttcatcggcttcaccttgaagccagattcatgttaaaggtcaagaaaggatgcccggttatgtaccaatccaccctcaccagcaagtaatgcttgctgcaaaacagatccatgtgcaacacaaggcagatgtcagctgcaagctgaatgtgagggtaatcggggtaatcactagcccactgggtagaactctgaaactctgtaaaaggacatactgacacaatttcaaataatatgacactgctttgaatggagggtagcaaatggaagaagcagaccattctgagttgctccttgccggcaatgtcaggaggctaccagggcaaaggcagaggtaggaacaatgcttttcctccttgagtaaggtgcagctggccatgcttttttcactatagatagtgccaaagttgcagagacacctacagaggaaagcaaaatcatttctaaacattaaagcccatgtaaagaccaggcatggtggctcacgcctgtaatcccagcactttgggaggctgaagtgggcggatcacttgaggtcaggagttggagaccagcctggccaacatgatgaaaccccgtctctagtaaaaatacaaaaattagccgggcatggtggcatgcacctgtagttccagctactcaggaggctgaggcaagagaattgcttgaacccgggggaaggaggttgcagtgagctgaaatcatgccactgcactccagcttgggtgacagagtgaaactttgcctagggaaaaaaaaaaaaaaaaggcaccccatgtgatataaaattgtataccaaaaaggatttttaaacttgagacattaagtttatcaagactttatcgacagtttagcaactattgcctgtgggccaaaccaagccagcagtctgtttctgtacagcccttaaggaaagaatggtttttacatttttaagagatgtaaaaataaataagaacaaaaactatttgcgggcagaaaggcctaaaatattaattacctggccctttaccgaaaaaatttgcagacccctacatgaaaacatgcagtctaagagttaagattcagttcatctatagaggttcggattaaaaaaaaaaaaatcaatagcattcaatagcattctgtagtcaaatgggtgagccatgctaaaagtctgggcctggttactgatgtctgtttacactccgttgcctcttactgtctactcacttcagttagaaactggaaaaatatttggtaggggataaaaagtgaaaccggctttgttatttttcaggacaacatatattcatatatattatctattttgtctctcccaaatcatgtagcaagcaaacaccacattcttttagattaagacacacattatttatcatttattctatcacaaccaccaaactcaatactttacatacatgtaaaatttcattttgtttcttccataaaagctccctaagagatggaatttattgtctgctttgttcactaacaaatccccaatacccagaatagggtctggcactttatgggtgctcaataaatttatgattattaatgaatcctcacaagaaaataagctaatcattagtattactcatatccggaaaatgagagatgaataacttggcctactcaatagtgtcaaagctagaacctgaactcaggcattctgaccacagtctaagtgaagcccgatgcttccacataggtatgtgccaagggaatgtctaactttcgttggactatcaaggtgtgaactataatgcttctgttattgcaactagcagtgccagttttaaatttcctattctcagatgacccatgtgctacaggaaaacaaacacacaactcaaatgtcttcatgtactcacttatctgagtgtcacttttctaagaagtgcaatgtcattttgtcacagatattaaaagttttcgtcaaagaaaatataagtgcaaaactctgacagttaagtccttttcatttttaaagaaaaagtttggccgggcaccgtggctcacgcctgtaatcccagcactttgggaggcagaggcgggcggatcacgaggtcaggagacggagaccatcctggctaacacggtgaaaccccatctgtactaaaaatacaaaaaattagccgggcatgatggcgggcgcctgcagtcccagctacttgggaggctgaagcaggagaatggcgtgaacccgggaggcggagcttgcagtgagacaagatcgtgccactgcactccagcctgggcgacagagcgagactccgtctcaaaaaaggaaagaaaagaaaaagttgtgttacttatactttatgcaactaggtaacttaagttctgcaagttagaaatcaaaggggaaaaaagtccaaaaaggatataaacttttgacagctacaaataacaaaaaaactgccagtgatcttcatacagaaatacttagctgtacacacagcaagtgctcaataaaaatgcttttcagaagaaatgaaaatgagacaaacctttcttgggttttacaaaccttcttggtttgtatactagaaagagctacacgaaaaaaagcaagaagtaacactcatgaaaatgtctttggacggaatgaaaaccctgagaggactcccataatgtgacagcatgaaggaaaacaataaacagcatcactaagagcggggacaccagacatacagtcttttgagcaaactaagaaaatgagaaattccgtgccatcttcaatctacaactatggtagatatccgatgctccatcccatctcactcgaaaaagctggcacggagaaaatgtcaaaaaggccagtttaacttagagtggcagctgcttctaatttagagggtctccggggcggcccgccagcccaattcgccacagctcccggaaagcagcggggtaatccagggccgggtaaaaaatgcagaagcctcagccccaccccagcccgattcaaactctggaggcgcgaccgggatgaacatttttttagccacacctccagacggttcttcagcccgctgaagttcaaaaactaccgtttcagttggattcagggcaaggggaggccggtaagtcgcccaaaaataaagtgaatgagaagcagaagttgttaatactatatcccccggcaggtgctaaccgcacgccgacccgactgcagcgcgggaacggaaggaggaaacggaagatttgaaaagattctgccgcccccagaaactgtgcgacccgtgccctcgcagccacccccaagaagctccgtctttaccaacgcgagcagcgcagcagcttctccaggcggtcgagcgcggcgcgactgtgggcccaggcaccgcgaccatccggttccatggcgggcgcggaacgaggctcgttcccggagcggatcctcggctgccggttcctcggctgccgattatccggcatcgtcccgccttcggatgaaaggctcctcgcagagcgggaagcaaggaagcctcgggaaaccacagggaagctgcaggccagcgactcgaaaccggccaagctcttcccgcgtct